(19) United States
(12) Patent Application Publication
(10) Pub. No.: US 2005/0032724 A1
(43) Pub. Date: Feb. 10, 2005

(54) Methods for improved treatment of cancer with irinotecan based on mrp1

(76) Inventors: Gunther Heinrich, Starnberg (DE); Reinhold Kerb, Munchen (DE)

Correspondence Address: LADAS & PARRY, 26 WEST 61ST STREET, NEW YORK, NY, 10023, US

(21) Appl. No.: 10/484,577

(22) PCT Filed: Jul. 23, 2002
(86) PCT No.: PCT/EP02/08200

(30) Foreign Application Priority Data
Jul. 23, 2001 (EP) 01117608.8
May 24, 2002 (EP) 02011710.7

(51) Int. Cl. A61K 48/00

(52) U.S. Cl. 514/44

(57) ABSTRACT

The present invention relates to the use of irinotecan or derivative thereof for the preparation of a pharmaceutical composition for treating cancer, especially, colorectal cancer, cervical cancer, gastric cancer, lung cancer, malignant glioma, ovarian cancer, and pancreatic cancer in a patient having a genotype with a variant allele which comprises a polynucleotide in accordance with the present invention. Preferably, a nucleotide deletion, addition and/or substitution comprised by said polynucleotide results in an altered expression of a variant allele compared to the corresponding wild type allele or an altered activity of the polypeptide encoded by the variant allele compared to the polypeptide encoded by the corresponding wild type allele. Finally, the present invention relates to a method for selecting a suitable therapy for a subject suffering from colorectal cancer, cervical cancer, gastric cancer, lung cancer, malignant glioma, ovarian cancer, and pancreatic cancer.

[0001] The present invention relates to the use of camptothecin drugs, such as irinotecan (CPT-11) or a derivative thereof for the preparation of a pharmaceutical composition for treating cancer, especially, colorectal cancer, cervical cancer, gastric cancer, lung cancer, malignant glioma, ovarian cancer, and pancreatic cancer in a patient having a genotype with a variant allele which comprises a polynucleotide in accordance with the present invention. Preferably, a nucleotide deletion, addition and/or substitution comprised by said polynucleotide results in an altered expression of the variant allele compared to the corresponding wild type allele or an altered activity of the polypeptide encoded by the variant allele compared to the polypeptide encoded by the corresponding wild type allele. Finally, the present invention relates to a method for selecting a suitable therapy for a subject suffering from colorectal cancer, cervical cancer, gastric cancer, lung cancer, malignant glioma, ovarian cancer or pancreatic cancer.

[0002] Irinotecan is a semisynthetic analog of the cytotoxic alkaloid camptothecin (CPT), which is obtained from the oriental tree, Camptotheca acuminata Camptothecins demonstrate anti-neoplastic activities by inhibiting specifically with the enzyme topoisomerase I which relieves torsional strain in DNA by inducing reversible single-strand breaks [D'Arpa, et al., 1989, Biochim Biophys Acta 989:163-77, Horwitz, et al., 1973, Cancer Res 33:2834-6]. Irinotecan and its active metabolite SN-38 bind to the topoisomerase I-DNA complex and prevent religation of these single-strand breaks [Kawato, et al., 1991, Cancer Res 51:4187-91]. Irinotecan serves as a water-soluble prodrug of the lipophilic metabolite SN-38 (7-ethyl-10-hydroxycamptothecin) which is formed from irinotecan by carboxylesterase-mediated cleavage of the carbamate bond between the camptothecin moiety and the dipiperidino side chain [Tsuji, et al., 1991, J Pharmacobiodyn 14:341-9]. Carboxylesterase-2 is the primary enzyme involved in this hydrolysis at at pharmacological concentrations [Humerickhouse, et al., 2000, Cancer Res 60:1189-92]. Topoisomerase inhibition and irinotecan-related single strand breaks are caused primarily by SN-38 [Kawato, et al., 1991, Cancer Res 51:4187-91]. Administration of irinotecan has resulted in antitumor activity in mice bearing cancers of rodent origin and in human carcinoma xenografts of various histological types [Furuta, et al., 1988, Gan To Kagaku Ryoho 15:2757-60, Giovanella, et al., 1989, Science 246:1046-8, Giovanella, et al., 1991, Cancer Res 51:3052-5, Hawkins, 1992, Oncology (Huntingt) 6:17-23, Kunimoto, et al., 1987, Cancer Res 47:5944-7].

[0003] Irinotecan is also oxidized by CYP3A4 and CYP3A5 [Haaz, et al., 1998, Drug Metab Dispos 26:769-74, Kuhn, 1998, Oncology (Huntingt) 12:39-42, Santos, et al., 2000, Clin Cancer Res 6:2012-20, Rivory, et al., 1996, Cancer Res 56:3689-94]. The major elimination pathway of SN-38 is conjugation with glucuronic acid to form the corresponding glucuronide (SN-38G) [Atsumi, et al., 1991, Xenobiotica 21:1159-69.]. SN-38G is reported to be deconjugated by the intestinal microflora to form SN-38 [Kaneda, et al., 1990, Cancer Res 50:1715-20]. Glucuronidation of SN-38 is mediated by UGT1A1 and UGT1A7 [Lyer, et al., 1998, J Clin Invest 101:847-54, Ciotti, et al., 1999, Biochem Biophys Res Commun 260:199-202]. Mass balance studies have demonstrated that 64% of the total dose is excreted in the feces, confirming the important role of biliary excretion [Slatter, et al., 2000, Drug Metab Dispos 28:423-33]. Studies suggest that the multidrug rsistance protein 1 (MRP1) is a major transporter of irinotecan and its metabolites [Kuhn, 1998, Oncology (Huntingt) 12:39-42, Chen, et al., 1999, Mol Pharmacol 55:921-8, Chu, et al., 1997, Cancer Res 57:1934-8, Chu, et al., 1997, J Pharmacol Exp Ther 281:304-14] and facilitate their biliary excretion, where they cause side effects, although P-glycoprotein also participates in irinotecan excretion [Chu, et al., 1998, Cancer Res 58:5137-43, Chu, et al., 1999, Drug Metab Dispos 27:440-1, Chu, et al., 1999, J Pharmacol Exp Ther 288:735-41, Mattern, et al., 1993, Oncol Res 5:467-74, Hoki, et al., 1997, Cancer Chemother Pharmacol 40:433-8, Sugiyama, et al., 1998, Cancer Chemother Pharmacol 42:S44-9].

[0004] Cellular resistance to camptothecins and thus, therapeutic response of irinotecan has been related to intracellular carboxylesterase activity and cleavage activity of topoisomerase I [van Ark-Otte, et al., 1998, Br J Cancer 77:2171-6, Guichard, et al., 1999, Br J Cancer 80:364-70].

[0005] The use of such camptothecin drugs, e.g. irinotecan, is limited by clearly dose-dependent myelosuppression and gastrointestinal toxicities, including nausea, vomiting, abdominal pain, and diarrhea which side effects can prove fatal. The major dose-limiting toxicity of irinotecan therapy is diarrhea, which occurs in up to 88% of patients and which depends on intestinal SN-38 accumulation [van Ark-Otte, et al., 1998, Br J Cancer 77:2171-6, Guichard, et al., 1999, Br J Cancer 80:364-70, Araki, et al., 1993, Jpn J Cancer Res 84:697-702] secondary to the biliary excretion of SN-38, the extent of which is determined by SN-38 glucuronidation [Gupta, et al., 1994, Cancer Res 54:3723-5, Gupta, et al., 1997, J Clin Oncol 15:1502-10]. Myelosuppression has been correlated with the area under the concentration-time curve of both irinotecan and SN-38 [Sasaki, et al., 1995, Jpn J Cancer Res 86:101-10].

[0006] Despite the approval of irinotecan for patients with metastatic colorectal cancer refractory to 5-fluorouracil therapy in 1997, the therapeutic benefit remains questionable. Recently two large clinical trials on colorectal cancer involving more than 2000 patients had to be canceled by the National Institute of Cancer (NCI) due to an almost 3-times increase of irinotecan toxicity-related mortality within the first 60 days of treatment. Causes of death were diarrhea- and vomiting-related dehydratation and neutropenia-related sepsis [2001, arznei-telegramm 32:58]. Although irinotecan was proven to be effective against thencancer itself, not all patients could benefit from longterm survival due to short term toxicity. Thus, it is highly desirable to identify those patients who will most likely suffer from irinotecan toxicity.

[0007] Currently, patients are treated according to most treatment schedules with a standard dose of initially 60 to 125 mg/m² irinotecan in combination with other anti-neoplastic drugs administered several courses of 3 to 4 weekly dosings, and subsequent doses are adjusted in 25 to 50 mg/m² increments based upon individual patient tolerance to treatment. Treatment may be delayed 1 to 2 weeks to allow for recovery from irinotecan-related toxicity and if the patient has not recovered, therapy has to be discontinued. Provided intolerable toxicity does not develop, treatment with additional courses are continued indefinitely as long as the patient continues to experience clinical benefit. Response rates varies depending from tumor type from less than 10% to almost 90%. However, it takes at least 6 to 8 weeks to evaluate therapeutic response and to consider altematives. Thus, finding the right dosage for the patient is tedious, time-consuming and takes the risk of lifethreatening adverse effects. Patients might be unnecessarily put to this risk who do not benefit from treatment and additionally, worthwhile time is wasted before these patients receive their suitable treatment.

[0008] Furthermore, as observed for many chemotherapeutic agents, the risk to develop cellular resistances against therapy is increased upon suboptimal exposure of cells to chemotherapeutic agents, such as irinotecan.

[0009] Pharmacokinetic modulation with inhibitors of biliary excretion (e. g., MRP and P-glycoprotein) and inducers of UGT1A1 have been suggested as a tool to reduce camptothecin-related toxicity [Gupta, et al., 1996, Cancer Res 56:1309-14, Gupta, et al., 1997, Cancer Chemother Pharmacol 39:440-4]. Although preliminary data of a clinical study of irinotecan in combination with cyclosporine A, and phenobarbital show some promising results in respect to limit camptothecin-related diarrhea [Ratain, 2000, Clin Cancer Res 6:3393-4], cotreatment with drugs such as cyclosporine A, and phenobarbital takes the additional risk of adverse events and drug interactions.

[0010] Large interpatient variability exist for both SN-38 and SN-38G pharmacokinetics [Canal, et al., 1996, J Clin Oncol 14:2688-95], which is likely to be due to interpatient differences in the metabolism pathways of irinotecan [Rivory, et al., 1997, Clin Cancer Res 3:1261-6]. Furthermore, severe irinotecan toxicity has been reported in patients with Gilbert syndrome [Wasserman, et al., 1997, Ann Oncol 8:1049-51]. Consequently, a genetic predisposition to the metabolism of irinotecan, that patients with low UGT1A1 activity are at increased risk for irinotecan toxicity has been suggested [lyer, et al., 1998, J Clin Invest 101:847-54, Ando, et al., 1998, Ann Oncol 9:845-7]. A common polymorphism in the UGT1A1 promoter [Monaghan, et al., 1996, Lancet 347:578-81] has been correlated with in vitro glucuronidation of SN-38 [lyer, et al., 1999, Clin Pharmacol Ther 65:576-82], and its possible clinical use has been suggested from a case control study [Ando, et al., 2000, Cancer Res 60:6921-6]. However, irinotecan-related toxicity was predicted by UGT1A1 genotype only in the minority of affected patients (<15%).

[0011] In conclusion, it would be highly desirable to significantly improve therapeutic efficacy and safety of camptothecin-based therapies and to avoid therapy-caused fatalities, to avoid unnecessary development of resistances, and to reduce adverse events- and therapeutic delay-related hospitalization costs. However, no accepted mechanism for reducing irinotecan toxicity or to improve therapeutic efficacy are currently available.

[0012] Thus, the technical problem underlying the present invention is to provide improved means and methods for the efficient treatment of colorectal cancer, cervical cancer, gastric cancer, lung cancer, malignant glioma, ovarian cancer, and pancreatic cancer, whereby the aforementioned undesirable side effects are to be avoided. The technical problem underlying the present invention is solved by the embodiments characterized in the claims.

[0013] Accordingly, the present invention relates to the use of irinotecan or a derivative thereof for the preparation of a pharmaceutical composition for treating cancer, especially, colorectal cancer, cervical cancer, gastric cancer, lung cancer, malignant glioma, ovarian cancer, and pancreatic cancer in a subject having a genome with a variant allele which comprises a polynucleotide selected from the group consisting of:
[0014] (a) a polynucleotide having the nucleic acid sequence of any one of SEQ ID NOs: 169, 170, 173, 174, 177, 178, 181, 182, 185, 186, 189, 190, 193, 194, 197, 198, 201, 202, 205, 206, 209, 210, 213, 214, 217, 218, 221, 222, 225, 226, 229, 230, 233, 234, 237, 238, 241, 242, 245, 246, 249, 250, 253, 254, 257, 258, 261, 262, 265, 266, 269, 270, 273, 274, 277, 278, 281, 282, 285, 286, 289, 290, 293, 294, 297, 298, 301, 302, 305, 306, 309, 310, 313, 314, 317, 318, 321, 322, 325, 326, 329, 330, 333 and/or 334;
[0015] (b) a polynucleotide encoding a polypeptide having the amino acid sequence of any one of SEQ ID NOs: 600, 602 and/or 604;
[0016] (c) a polynucleotide capable of hybridizing to a Multidrug Resistance Protein 1 (MRP1) gene, wherein said polynucleotide is having at a position corresponding to positions 57998, 57853, 53282, and/or 39508 of the MRP1 gene (Accession No: GI:7209451), a substitution or deletion of at least one nucleotide or at a position corresponding to positions 137667, 137647, 137710, 124667, and/or 38646 of the MRP1 gene (Accession No: AC026452), a substitution or deletion of at least one nucleotide or at a position corresponding to positions 27258, 27159, 34218, 34215, 55472, and/or 34206 to 34207 of the MRP1 gene (Accession No: AC003026), a substitution or deletion of at least one nucleotide or at a position corresponding to positions 21133, 14008, 18067, 17970, and/or 17900 of the MRP1 gene (Accession No: U91318), a substitution or deletion of at least one nucleotide or at a position corresponding to positions 79, 88, and/or 249 of the MRP1 gene (Accession No: AF022830), a substitution or deletion of at least one nucleotide or at a position corresponding to positions 95 and/or 259 of the MRP1 gene (Accession No: AF022831), a substitution or deletion of at least one nucleotide or at a position corresponding to positions 150727 and/or 33551 of the MRP1 gene (Accession No: AC025277), a substitution or deletion of at least one nucleotide or at a position corresponding to position 174 of the MRP1 gene (Accession No: AF022828), a substitution or deletion of at least one nucleotide or at a position corresponding to positions 248 and/or 258 of the MRP1 gene (Accession No: AF022829), a substitution or deletion of at least one nucleotide or at a position corresponding to positions 1884, 1625, 1163, 381, 233, 189, 440, and/or 1720 to 1723 of the MRP1 gene (Accession No: U07050), a substitution or deletion of at least one nucleotide or at a position corresponding to positions 926/927 and/or 437/438 of the MRP1 gene (Accession No: U07050) a insertion of at least one nucleotide or at a position corresponding to position 55156/55157 of the MRP1 gene (Accession No: AC003026) a insertion of at least one nucleotide;
[0017] (d) a polynucleotide capable of hybridizing to a MRP1 gene, wherein said polynucleotide is having at a position corresponding to position 21133, 14008 and/or 18195 of the MRP1 gene (Accession No: U91318) or at a position corresponding to position 27258 and/or 34218 of the MRP1 gene (Accession No: AC003026) or at a position corresponding to position 79 of the MRP1 gene (Accession No: AF022830) or at a position corresponding to position 57998, and/or 57853 of the MRP1 gene (Accession No: GI:7209451) or at a position corresponding to position 137667 and/or 137647 of the MRP1 gene (Accession No: AC026452) or at a position corresponding to position 150727 and/or 33551 of the MRP1 gene (Accession No: AC025277) or at a position corresponding to position 248 of the MRP1 gene (Accession No: AF022829) or at a position corresponding to position 1884, 1625, 233, and/or 189 of the MRP1 gene (Accession No: U07050) an A, at a position corresponding to position 39508 of the MRP1 gene (Accession No: GI:7209451) or at a position corresponding to position 17900, 18067 and/or 18195 of the MRP1 gene (Accession No: U91318) or at a position corresponding to position 174 of the MRP1 gene (Accession No: AF022828) or at a position corresponding to position 440 and/or 1163 of the MRP1 gene (Accession No: U07050) a T, at a position corresponding to position 88 of the MRP1 gene (Accession No: AF022830) or at a position corresponding to position 95 of the MRP1 gene (Accession No: AF022831) or at a position corresponding to position 27159, 55472 and/or 34215 of the MRP1 gene (Accession No: AC003026) or at a position corresponding to position 124667 and/or 38646 of the MRP1 gene (Accession No: AC026452) or at a position corresponding to position 53282 of the MRP1 gene (Accession No: GI:7209451) or at a position corresponding to position 137710 of the MRP1 gene (Accession No: AC026452) a C, at a position corresponding to position 249 of the MRP1 gene (Accession No: AF022830) or at a position corresponding to position 258 of the MRP1 gene (Accession No: AF022829) or at a position corresponding to position 259 of the MRP1 gene (Accession No: AF022831) or at a position corresponding to position 381 of the MRP1 gene (Accession No: U07050) a G, at a position corresponding to position 17970 of the MRP1 gene (Accession No: U91318) a deletion of a T or at a position corresponding to position 34206 to 34207 of the MRP1 gene (Accession No: AC003026) a deletion of a AT or at a position corresponding to position 1720 to 1723 of the MRP1 gene (Accession No: U07050) a deletion of GGTA, at a position corresponding to position 926/927 a insertion of a T and/or 437/438 of the MRP1 gene (Accession No: U07050) a insertion of a TCCTTCC, at a position corresponding to position 55156/55157 of the MRP1 gene (Accession No: AC003026) a insertion of TGGGGC;
[0018] (e) a polynucleotide encoding an MRP1 polypeptide or fragment thereof, wherein said polypeptide comprises an amino acid substitution of Phe to Cys at a position corresponding to position 239 of the MRP1 polypeptide (Accession No: G2828206) or/and Arg to Ser at a position corresponding to position 433 of the MRP1 polypeptide (Accession No: G2828206) or/and Arg to Gin at a position corresponding to position 723 of the MRP1 polypeptide (Accession No: G2828206).

[0019] The term “irinotecan or a derivative thereof” as used in accordance with the present invention preferably refers to a substance which is characterized by the general structural formula [chemical structure]
further described in U.S. Pat. No. 05,106,742, U.S. Pat. No. 05,340,817, U.S. Pat. No. 05,364,858, U.S. Pat. No. 05,401,747, U.S. Pat. No. 05,468,754, U.S. Pat. No. 05,559,235 and U.S. Pat. No. 05,663,177. Moreover, also comprised by the term “irinotecan or a derivative thereof” are analogues and derivatives of camptothecin. The types and ranges of camptothecin analogues available are well known to those of skill in the art and described in numerous texts, e.g. [Hawkins, 1992, Oncology (Huntingt) 6:17-23, Burris, et al., 1994, Hematol Oncol Clin North Am 8:333-55, Slichenmyer, et al., 1993, J Natl Cancer Inst 85:271 -91, Slichenmyer, et al., 1994, Cancer Chemother Pharmacol 34:S53-7]. Specific examples of active camptothecin analogues are hexacyclic camptothecin analogues, 9-nitro-camptothecin, camptothecin analogues with 20S configuration with 9- or 10-substituted amino, halogen, or hydroxyl groups, seven-substituted water-soluble camptothecins, 9-substituted camptothecins, E-ring-modified camptothecins such as (RS)-20-deoxyamino-7-ethyl-10-methoxycamptothecin, and 10-substituted camptothecin analogues [Emerson, et al., 1995, Cancer Res 55:603-9, Ejima, et al., 1992, Chem Pharm Bull (Tokyo) 40:683-8, Sugimori, et al., 1994, J Med Chem 37:3033-9, Wall, et al., 1993, J Med Chem 36:2689-700, Wani, et al., 1980, J Med Chem 23:554-60, Kingsbury, et al., 1991, J Med Chem 34:98-107]. Various other camptothecin analogues with similar therapeutic activity are described [Hawkins, 1992, Oncology (Huntingt) 6:17-23, Burris and Fields, 1994, Hematol Oncol Clin North Am 8:333-55, Slichenmyer, et al., 1993, J Natl Cancer Inst 85:271-91, Slichenmyer, et al., 1994, Cancer Chemother Pharmacol 34:S53-7]. Suitable methods for synthezising camptothecin analogues are described [Emerson, et al., 1995, Cancer Res 55:603-9, Ejima, et al., 1992, Chem Pharm Bull (Tokyo) 40:683-8, Sugimori, et al., 1994, J Med Chem 37:3033-9, Wall, et al., 1993, J Med Chem 36:2689-700, Wani, et al., 1980, J Med Chem 23:554-60, Kingsbury, et al., 1991, J Med Chem 34:98-107, Sugasawa, et al., 1976, J Med Chem 19:675-9].

[0021] Said substances are known to be therapeutically useful as described, e.g., in colorectal cancer, non-small cell and small cell lung cancer, oesophageal cancer, renal cell carcinoma, ovarian cancer, breast cancer, pancreatic cancer, squamous cell cancer, leukemias and lymphomas [Kawato, et al., 1991, Cancer Res 51:4187-91, Furuta, et al., 1988, Gan To Kagaku Ryoho 15:2757-60, Hawkins, 1992, Oncology (Huntingt) 6:17-23, Slichenmyer, et al., 1993, J Natl Cancer Inst 85:271-91, Slichenmyer, et al., 1994, Cancer Chemother Pharmacol 34:S53-7, Tsuruo, et al., 1988, Cancer Chemother Pharmacol 21:71-4, Wiseman, et al., 1996, Drugs 52:606-23, Gottlieb, et al., 1970, Cancer Chemother Rep 54:461-70, Negoro, et al., 1991, J Natl Cancer Inst 83:1164-8, Rowinsky, et al., 1994, Cancer Res 54:427-36]. Also encompassed by the use of the present invention are derivatives of those substances which are obtainable by way of any chemical modification, wherein said derivatives are equally well therapeutically suited for the use of the present invention. To determine whether a derivative of the substances of the invention is equally well therapeutically suited for the use of the invention biological assays well known in the art can be performed. Such assays are described, e.g., in [Kawato, et al., 1991, Cancer Res 51:4187-91, Furuta, et al., 1988, Gan To Kagaku Ryoho 15:2757-60, Giovanella, et al., 1989, Science 246:1046-8, Giovanella, et al., 1991, Cancer Res 51:3052-5, Kunimoto, et al., 1987, Cancer Res 47:5944-7, Mattern, et al., 1993, Oncol Res 5:467-74, Tsuruo, et al., 1988, Cancer Chemother Pharmacol 21:71-4, Burris, et al., 1992, J Natl Cancer Inst 84:1816-20, Friedman, et al., 1994, Cancer Chemother Pharmacol 34:171-4].

[0022] It is contemplated that any of the compounds described in the above publications may be used in this invention.

[0023] It has been show that irinotecan is particularly well suited for the treatment of colorectal cancer, cervical cancer, gastric cancer, lung cancer, malignant glioma, ovarian cancer, and pancreatic cancer. Thus, most preferably the substance used according to the present invention is irinotecan.

[0024] The term “pharmaceutical composition” as used herein comprises the substances of the present invention and optionally one or more pharmaceutically acceptable carrier. The substances of the present invention may be formulated as pharmaceutically acceptable salts. Acceptable salts comprise acetate, methylester, HCl, sulfate, chloride and the like. The pharmaceutical compositions can be conveniently administered by any of the routes conventionally used for drug administration, for instance, orally, topically, parenterally or by inhalation. The substances may be administered in conventional dosage forms prepared by combining the drugs with standard pharmaceutical carriers according to conventional procedures. These procedures may involve mixing, granulating and compressing or dissolving the ingredients as appropriate to the desired preparation. It will be appreciated that the form and character of the pharmaceutically acceptable character or diluent is dictated by the amount of active ingredient with which it is to be combined, the route of administration and other well-known variables. The carrier(s) must be “acceptable” in the sense of being compatible with the other ingredients of the formulation and not deleterious to the recipient thereof. The pharmaceutical carrier employed may be, for example, either a solid or liquid. Exemplary of solid carriers are lactose, terra alba, sucrose, talc, gelatin, agar, pectin, acacia, magnesium stearate, stearic acid and the like. Exemplary of liquid carriers are phosphate buffered saline solution, syrup, oil such as peanut oil and olive oil, water, emulsions, various types of wetting agents, sterile solutions and the like. Similarly, the carrier or diluent may include time delay material well known to the art, such as glyceryl mono-stearate or glyceryl distearate alone or with a wax. The substance according to the present invention can be administered in various manners to achieve the desired effect. Said substance can be administered either alone or in the formulated as pharmaceutical preparations to the subject being treated either orally, topically, parenterally or by inhalation. Moreover, the substance can be administered in combination with other substances either in a common pharmaceutical composition or as separated pharmaceutical compositions.

[0025] The diluent is selected so as not to affect the biological activity of the combination. Examples of such diluents are distilled water, physiological saline, Ringer's solutions, dextrose solution, and Hank's solution. In addition, the pharmaceutical composition or formulation may also include other carriers, adjuvants, or nontoxic, nontherapeutic, nonimmunogenic stabilizers and the like. A therapeutically effective dose refers to that amount of the substance according to the invention which ameliorate the symptoms or condition. Therapeutic efficacy and toxicity of such compounds can be determined by standard pharmaceutical procedures in cell cultures or experimental animals, e.g., ED50 (the dose therapeutically effective in 50% of the population) and LD50 (the dose lethal to 50% of the population). The dose ratio between therapeutic and toxic effects is the therapeutic index, and it can be expressed as the ratio, LD50/ED50.

[0026] The dosage regimen will be determined by the attending physician and other clinical factors; preferably in accordance with any one of the above described methods. As is well known in the medical arts, dosages for any one patient depends upon many factors, including the patient's size, body surface area, age, the particular compound to be administered, sex, time and route of administration, general health, and other drugs being administered concurrently. Progress can be monitored by periodic assessment.

[0027] A typical dose can be, for example, in the range of 5 to 100 mg however, doses below or above this exemplary range are envisioned, especially considering the aforementioned factors. Generally, the regimen as a regular administration of the pharmaceutical composition should be in the range of 1 μg to 10 mg units per day. If the regimen is a continuous infusion, it should also be in the range of 1 μg to 10 mg units per kilogram of body weight per minute, respectively. Progress can be monitored by periodic assessment. However, depending on the subject and the mode of administration, the quantity of substance administration may vary over a wide range to provide from about 1 mg per m² body surface to about 500 mg per m² body surface, usually 20 to 200 mg per m² body surface.

[0028] The pharmaceutical compositions and formulations referred to herein are administered at least once in accordance with the use of the present invention. However, the said pharmaceutical compositions and formulations may be administered more than one time, for example once weekly every other week up to a non-limited number of weeks.

[0029] Specific formulations of the substance according to the invention are prepared in a manner well known,in the pharmaceutical art and usually comprise at least one active substance referred to herein above in admixture or otherwise associated with a pharmaceutically acceptable carrier or diluent thereof. For making those formulations the active substance(s) will usually be mixed with a carrier or diluted by a diluent, or enclosed or encapsulated in a capsule, sachet, cachet, paper or other suitable containers or vehicles. A carrier may be solid, semisolid, gel-based or liquid material which serves as a vehicle, excipient or medium for the active ingredients. Said suitable carriers comprise those mentioned above and others well known in the art, see, e.g., Remington's Pharmaceutical Sciences, Mack Publishing Company, Easton, Penn. The formulations can be adopted to the mode of administration comprising the forms of tablets, capsules, suppositories, solutions, suspensions or the like.

[0030] The dosing recommendations will be indicated in product labeling by allowing the prescriber to anticipate dose adjustments depending on the considered patient group, with information that avoids prescribing the wrong drug to the wrong patients at the wrong dose.

[0031] The term “treating” means alleviation of the diseases symptoms, i.e., regression of symptoms or inhibited progression of such symptoms, in subjects or disease populations which have been treated. Said alleviation of the diseases can be monitored by the degree of the clinical symptoms (e.g. tumor size) accompanied with the disease. While the invention may not be effective in 100% of patients treated, it is effective in treating a statistically significant (p value less than 0.05) number of patients. Whether said number of subjects is significant can be determined by statistical tests such as the Student's t-test, the chi²-test, the U-test according to Mann and Whitney, the Kruskal-Wallis-test (H-Test), Jonckheere-Terpstra-test or the Wilcoxon-test.

[0032] The present invention also encompasses all embodiments described in connection with pharmaceutical compositions in U.S. Pat. No. 05,106,742, U.S. Pat. No. 05,340,817, U.S. Pat. No. 05364858, U.S. Pat. No. 05401747, U.S. Pat. No. 05468754, U.S. Pat. No. 05559235 and U.S. Pat. No. 05,663,177.

[0033] The terms “colorectal cancer, cervical cancer, gastric cancer, lung cancer, malignant glioma, ovarian cancer, and pancreatic cancer” comprise diseases and dysregulations related to cancer. Preferred diseases encompassed by the use of the present invention are colorectal cancer, cervical cancer, gastric cancer, lung cancer, malignant glioma, ovarian cancer, and pancreatic cancer. Said diseases and dysregulations are well known in the art and the accompanied symptoms are described, e.g., in standard text books such as Stedman.

[0034] The term “subject” as used in the sense of the present invention comprises animals, preferably those specified herein after, and humans.

[0035] The term “variant allele” as used herein refers to a polynucleotide comprising one or more of the polynucleotides described herein below corresponding to a MRP1 gene. Each individual subject carries at least two alleles of the MRP1 gene, wherein said alleles are distinguishable or identical. In accordance with the use of the present invention a variant allele comprises at least one or more of the polynucleotides specified herein below. Said polynucleotides may have a synergistic influence on the regulation or function of the first variant allele. Preferably, a variant allele in accordance with the use of the present invention comprises at least two of the polynucleotides specified herein.

[0036] In the context of the present invention the term “polynucleotides” or “polypeptides” refers to different variants of a polynucleotide or a polypeptide specified in accordance with the uses of the present invention. Said variants comprise a reference or wild type sequence of the polynucleotides or polypeptides specified herein as well as variants which differ therefrom in structure or composition. Reference or wild type sequences for the polynucleotides are Genbank accession No: GI:8850235, GI:11118740, GI:10281451, GI:11177452, GI:10281451, GI:6706037, U91318, GI:7209451, AC026452, AC003026, U91318, AF022830, GI:7209451, AC026452, AC003026, AC025277, AF022828, AF022829, AF022831, U07050, AC003026, AC002457, AC005068, M29432, M29445, and GI:11225259 or Accession No (Pid No): G8850236, G2828206, G2506118, and G12644118 for polypeptides. The differences in structure or composition usually occur by way of nucleotide or amino acid substitution(s), addition(s) and/or deletion(s).

[0037] Preferably, said nucleotide substitution(s), addition(s) or deletion(s) referred to in accordance with the use of the present invention result(s) in one or more changes of the corresponding amino acid(s) of the polypeptides. The variant polynucleotides also comprise fragments of said polynucleotides or polypeptides. The polynucleotides or polypeptides as well as the aforementioned fragments thereof are characterized as being associated with a MRP1 dysfunction or dysregulation comprising, e.g., insufficient and/or altered drug uptake. Preferred deletions in accordance with the invention are a T or AT deletion at a position corresponding to position 17970 of the MRP1 gene (Accession No: U91318) and/or 34206 to 34207 of the MRP1 gene (Accession No: AC003026), preferred insertion is a TCCTTCC at a position corresponding to position 437/438 of the MRP1 gene (Accession No: GI: U07050) and/or a TGGGGC insertion at a position corresponding to position 55156/55157 of the MRP1 gene (Accession No: AC003026).

[0038] The present invention also encompasses all embodiments described in connection with polynucleotides in WO9957322, WO0109183 or U.S. Pat. No. 5,786,344.

[0039] The term “hybridizing” as used herein refers to polynucleotides which are capable of hybridizing to the above polynucleotides or parts thereof which are associated with a MRP1 dysfunction or dysregulation. Thus, said hybridizing polynucleotides are also associated with said dysfunctions and dysregulations. Preferably, said polynucleotides capable of hybridizing to the aforementioned polynucleotides or parts thereof which are associated with MRP1 dysfunctions or dysregulations are at least 70%, at least 80%, at least 95% or at least 100% identical to the polynucleotides or parts thereof which are associated with MRP1 dysfunctions or dysregulations. Therefore, said polynucleotides may be useful as probes in Northern or Southern Blot analysis of RNA or DNA preparations, respectively, or can be used as oligonucleotide primers in PCR analysis dependent on their respective size. Also comprised in accordance with the use of the invention are hybridizing polynucleotides which are useful for analyzing DNA-Protein interactions via, e.g., electrophoretic mobility shift analysis (EMSA). Preferably, said hybridizing polynucleotides comprise at least 10, more preferably at least 15 nucleotides in length while a hybridizing polynucleotide to be used as a probe preferably comprises at least 100, more preferably at least 200, or most preferably at least 500 nucleotides in length.

[0040] It is well known in the art how to perform hybridization experiments with nucleic acid molecules, i.e. the person skilled in the art knows what hybridization conditions s/he has to use in accordance with the present invention. Such hybridization conditions are referred to in standard text books, such as Molecular Cloning, A Laboratory Manual, Cold Spring Harbor Laboratory (1989) N.Y. Preferred in accordance with the use of the present inventions are polynucleotides which are capable of hybridizing to the above polynucleotides or parts thereof which are associated with a MRP1 dysfunction or dysregulation under stringent hybridization conditions, i.e. which do not cross hybridize to unrelated polynucleotides such as polynucleotides encoding a polypeptide different from the MRP1 polypeptides of the invention.

[0041] Moreover, methods for determining whether a subject comprises a polynucleotide referred to herein above are well known in the art. To carry out said methods, it might be necessary to take a sample comprising biological material, such as isolated cells or tissue, from said subject. Further, the methods known in the art could comprise for example, PCR based techniques, RFLP-based techniques, DNA sequencing-based techniques, hybridization techniques, Single strand conformational polymorphism (SSCP), denaturating gradient gel electrophoresis (DGGE), mismatch cleavage detection, heteroduplex analysis, techniques based on mass spectroscopy, HPLC-based techniques, primer extension-based techniques, and 5′-nuclease assay-based techniques. A preferred and convenient method to be used in order to determine the presence or absence of one or more of the above specified polynucleotides is to isolate blood cells from a subject and to perform a PCR based assay on genomic DNA isolated from those blood cells, whereby the PCR is used to determine whether said polynucleotides specified herein above or parts thereof are present or absent. Said method is described in more detail below and in the Examples.

[0042] The term “corresponding” as used herein means that a position is not only determined by the number of the preceding nucleotides and amino acids, respectively. The position of a given nucleotide or amino acid in accordance with the use of the present invention which may be deleted, substituted or comprise one or more additional nucleotide(s) may vary due to deletions or additional nucleotides or amino acids elsewhere in the gene or the polypeptide. Thus, under a “corresponding position” in accordance with the present invention it is to be understood that nucleotides or amino acids may differ in the indicated number but may still have similar neighboring nucleotides or amino acids. Said nucleotides or amino acids which may be exchanged, deleted or comprise additional nucleotides or amino acids are also comprised by the term “corresponding position”. Said nucleotides or amino acids may for instance together with their neighbors form sequences which may be involved in the regulation of gene expression, stability of the corresponding RNA or RNA editing, as well as encode functional domains or motifs of the protein of the invention.

[0043] By, e.g., “position 17970 to 17970” it is meant that said polynucleotide comprises one or more deleted nucleotides which are deleted between positions 17970 and position 17970 of the corresponding wild type version of said polynucleotide. The same applies mutatis mutandis to all other position numbers referred to in the above embodiment which are drafted in the same format.

[0044] By, e.g., “position 1222/1223” it is meant that said polynucleotide comprises one or more additional nucleotide(s) which are inserted between positions 1222 and position 1223 of the corresponding wild type version of said polynucleotide. The same applies mutatis mutandis to all other position numbers referred to in the above embodiment which are drafted in the same format, i.e. two consecutive position numbers separated by a slash (/).

[0045] In accordance with the present invention, the mode and population distribution of genetic variations in the MRP1 gene—the different alleles of the MRP1 gene—have been analyzed by sequence analysis of relevant regions of the human said gene from many different individuals. It is a well known fact that genomic DNA of individuals, which harbor the individual genetic makeup of all genes, including the MRP1 gene, can easily be purified from individual blood samples. These individual DNA samples are then used for the analysis of the sequence composition of the alleles of the MRP1 gene that are present in the individual which provided the blood sample. The sequence analysis was carried out by PCR amplification of relevant regions of said genes, subsequent purification of the PCR products, followed by automated DNA sequencing with established methods (e.g. ABI dyeterminator cycle sequencing).

[0046] One important parameter that has to be considered in the attempt to determine the individual genotypes and identify novel variants of the MRP1 gene by direct DNA-sequencing of PCR-products from human blood genomic DNA is the fact that each human harbors (usually, with very few abnormal exceptions) two gene copies of each autosomal gene (diploidy). Because of that, great care has to be taken in the evaluation of the sequences to be able to identify unambiguously not only homozygous sequence variations but also heterozygous variations. The details of the different steps in the identification and characterization of the polymorphisms in the MRP1 gene (homozygous and heterozygous) are described in the Examples below.

[0047] Over the past 20 years, genetic heterogeneity has been increasingly recognized as a significant source of variation in drug response. Many scientific communications (Meyer, Ann. Rev. Pharmacol. Toxicol. 37 (1997), 269-296 and West, J. Clin. Pharmacol. 37 (1997), 635-648) have clearly shown that some drugs work better in some patients than in others or may even be highly toxic and that such variations in patients' responses to drugs can be correlated to a molecular basis. This “pharmacogenomic” concept spots correlations between responses to drugs and genetic profiles of patient's (Marshall, Nature Biotechnology, 15 (1997), 954-957; Marshall, Nature Biotechnology, 15 (1997), 1249-1252). In this context of population variability with regard to drug therapy, pharmacogenomics has been proposed as a tool useful in the identification and selection of patients which can respond to a particular drug without side effects. This identification/selection can be based upon molecular diagnosis of genetic polymorphisms by genotyping DNA from leukocytes in the blood of a patient, for example, and characterization of disease (Bertz, Clin. Pharmacokinet. 32 (1997), 210-256; Engel, J. Chromatogra. B. Biomed. Appl. 678 (1996), 93-103). For the founders of health care, such as health maintenance organizations in the US and government public health services in many European countries, this pharmacogenomics approach can represent a way of both improving health care and reducing costs related to health care caused by the development of unnecessary drugs, by ineffective drugs and by side effects due to drug administration.

[0048] The mutations in the variant genes of the invention sometimes result in amino acid deletion(s), insertion(s) and in particular in substitution(s) either alone or in combination. It is of course also possible to genetically engineer such mutations in wild type genes or other mutant forms. Methods for introducing such modifications in the DNA sequence of said genes are well known to the person skilled in the art; see, e.g., Sambrook, Molecular Cloning A Laboratory Manual, Cold Spring Harbor Laboratory (1989) N.Y.

[0049] For the investigation of the nature of the alterations in the amino acid sequence of the polypeptides of the invention may be used such as BRASMOL that are obtainable from the Internet. Furthermore, folding simulations and computer redesign of structural motifs can be performed using other appropriate computer programs (Olszewski, Proteins 25 (1996), 286-299; Hoffman, Comput. Appl. Biosci. 11 (1995), 675-679). Computers can be used for the conformational and energetic analysis of detailed protein models (Monge, J. Mol. Biol. 247 (1995), 995-1012; Renouf, Adv. Exp. Med. Biol. 376 (1995), 37-45). These analysis can be used for the identification of the influence of a particular mutation on metabolism, binding, inhibition, mediating of therapeutic action and/or transport of drugs. Moreover, based on the knowledge of the altered structure of the polypeptides which are encoded by the polynucleotides specified in the use of the present invention derivatives of the substances referred to above can be designed and synthesized which can be more efficiently metabolized, modified, transported, eliminated, and/or binded. Thereby, drugs or pro-drugs can be designed on the basis of the substances referred to herein which are more efficient in therapy of colorectal cancer, cervical cancer, gastric cancer, lung cancer, malignant glioma, ovarian cancer, and pancreatic cancer in a subject having a genotype characterized by the presence of one or more polynucleotides of the invention.

[0050] Usually, said amino acid deletion, addition or substitution in the amino acid sequence of the protein encoded by the polynucleotide referred to in accordance with the use of the present invention is due to one or more nucleotide substitution, insertion or deletion, or any combinations thereof. Preferably said nucleotide substitution, insertion or deletion may result in an amino acid substitution of the MRP1 gene are Phe to Cys at a position corresponding to position 329, Arg to Ser at a position corresponding to position 433 and/or Arg to Glu at a position corresponding to position 723 of the MRP1 polypeptide (Accession No:62828206). The polypeptides encoded by the polynucleotides referred to in accordance with the use described herein have altered biological properties due to the mutations referred to in accordance with the present invention. Examples for said altered properties are stability of the polypeptides or amount of the polypeptides which may be effected resulting in, e.g. an altered drug metabolism or an altered transport of drugs or an altered substrate specificity or an altered catalytic activity characterized by, e.g. insufficiencies in drug metabolism or a complete loss of the capability to metabolize drugs or an enhanced capacity to metabolize drugs or an altered transport activity characterized by, e.g., insufficiencies in drug transport or a complete loss of the capability of transporting drugs or an altered substrate binding characterized by, e.g. an altered drug action or an altered inhibition or induction of transport or an altered binding to receptors or other target molecules characterized by, e.g. an altered activation of signal transduction pathways or an altered protein or enzyme function. These altered properties result in an impaired pharmacological response to the substances referred to above of the subject to be treated in accordance with the use of the present invention. Moreover, due to said altered properties of the polypeptides encoded by the variant alleles specified herein the substances may be chemically modified in a way resulting in derivatives of the substances which are harmful or toxic for the subject or which cause undesirable side effects.

[0051] The mutations in the MRP1 gene detected in accordance with the present invention are listed in Tables 1 and 2. As is evident to the person skilled in the art, the genetic knowledge of the polynucleotides specified herein above can be used to exactly and reliably characterize the genotype of a patient.

[0052] Advantageously, therapeutical measures which are based on irinotecan or a derivative thereof can be more efficiently applied when taking into consideration said genetic knowledge. Undesirable side effects of said substances can be avoided and an effective but not harmful dosage can be calculated individually due the knowledge of the genetic makeup of the subject. Moreover in accordance with the foregoing, in cases where a given drug causes an unusual effect, a suitable individual therapy can be designed based on the knowledge of the individual genetic makeup of a subject. This tailored therapy will also be suitable to avoid the occurance of therapy resistances. Said resistances are one major problem in cancer chemotherapy with various chemotherapeutic agents, this fact being well known in the art. The use of the present invention, therefore, provides an improvement of the therapeutic applications which are based on the known therapeutically desirable effects of the substances referred to herein above since it is possible to individually treat the subject with an appropriate dosage and/or an appropriate derivative of said substances. Thereby, undesirable, harmful or toxic effects are efficiently avoided. Furthermore, the use of the present invention provides an improvement of the therapeutic applications which are based on the known therapeutically desirable effects of the substances referred to herein above since it is possible to identify those subject prior to onset of drug therapy and treat only those subjects with an appropriate dosage and/or an appropriate derivative of said substances who are most likely to benefit from therapy with said substances. Thereby, the unnecessary and potentially harmful treatment of those subjects who do not respond to the treatment with said substances (nonresponders), as well as the development of drug resistances due to suboptimal drug dosing can be avoided.

[0053] In accordance with the present invention it has been surprisingly found that a variant allele corresponding to the MRP1 gene alters the pharmacological response of said subject to the administration of irinotecan or a derivative thereof. Hence, in accordance with the use of the present invention the diseases and disorders referred to herein can be more efficiently treated whereby said therapies measures are more convenient for the subject. Moreover, the applicability of therapeutic measures comprising administration of the substances referred to herein above can be efficiently predicted.

[0054] In a preferred embodiment of the use of the present invention said variant allele comprises a polynucleotide selected from the group consisting of:
[0055] (a) a polynucleotide having the nucleic acid sequence of any one of SEQ ID NO: 181, 209, 217, 205, 277, 281, 301, 325, 229,193, 313, 293 or 253:
[0056] (b) a polynucleotid encoding a polypeptide having the amino acid sequence of SEQ ID NO: 600;
[0057] (c) a polynucleotide capable of hybridizing to a MRP1 gene, wherein said polynucleotide is having a substitution at a position corresponding to position 137647 of the MRP1 gene (Accession No: AC026452), 95 of the MRP1 gene (Accession No: AF022831), 53282 of the MRP1 gene (Accession No: GI:7209451), 249 of the MRP1 gene (Accession No: AF022830), 259 of the MRP1 gene (Accession No: AF022831), 124667 of the MRP1 gene (Accession No: AC026452), 381, 440,1625 of the MRP1 gene (Accession No: U07050), 34218 of the MRP1 gene (Accession No: AC003026), 18067 or 17900 of the MRP1 gene (Accession No: U91318) or an insertion of at least one nucleotide at a position corresponding to position 926/927 of the MRP1 gene (Accession No: U07050);
[0058] (d) a polynucleotide capable of hybridizing to a MRP1 gene, wherein said polynucleotide is having a T at a position corresponding to position 137647 of the MRP1 gene (Accession No: AC026452), 18067 or 17900 of the MRP1 gene (Accession No: U91318), 440 of the MRP1 gene (Accession No: U07050), a C at a position corresponding toposition 95 of the MRP1 gene (Accession No: AF022831), 124667 of the MRP1 gene (Accession No: AC026452), a G at a position corresponding to position 53282 of the MRP1 gene (Accession No: GI:7209451), 249 of the MRP1 gene (Accession No: AF022830), 259 of the MRP1 gene (Accession No: AF022831), 381 of the MRP1 gene (Accession No: U07050), or an A at a position corresponding to position 34218 of the MRP1 gene (Accession No: AC003026) or 1625 of the MRP1 gene (Accession No: U07050) or an insertion of a T at a position corresponding to position 926/927 of the MRP1 gene (Accession No: U07050);
[0059] (e) a polynucleotide encoding an MRP1 polypeptide or fragment thereof, wherein said polypeptide comprises an amino acid substitution at a position corresponding to position 329 of the MRP1 polypeptide (Accession No: G2828206); and
[0060] (f) a polynucleotide encoding an MRP1 polypeptide or fragment thereof, wherein said polypeptide comprises an amino acid substitution of Phe to Cys at a position corresponding to position 329 of the MRP1 polypeptide (Accession No: G2828206).

[0061] More preferably, said variant allele comprises a polynucleotide selected from the group consisting of:
[0062] (a) a polynucleotide having the nucleic acid sequence of any one of SEQ ID NO: 209, 205, 277, 281, 301 or 325;
[0063] (b) a polynucleotid encoding a polypeptide having the amino acid sequence of SEQ ID NO: 600;
[0064] (c) a polynucleotide capable of hybridizing to a MRP1 gene, wherein said polynucleotide is having a substitution at a position corresponding to position 95 of the MRP1 gene (Accession No: AF022831), 249 of the MRP1 gene (Accession No: AF022830), 259 of the MRP1 gene (Accession No: AF022831), 124667 of the MRP1 gene (Accession No: AC026452), 381 of the MRP1 gene (Accession No: U07050), or an insertion of at least one nucleotide at a position corresponding to position 926/927 of the MRP1 gene (Accession No: U07050);
[0065] (d) a polynucleotide capable of hybridizing to a MRP1 gene, wherein said polynucleotide is having a C at a position corresponding to position 95 of the MRP1 gene (Accession No: AF022831), 124667 of the MRP1 gene (Accession No: AC026452), a G at a position corresponding to position 249 of the MRP1 gene (Accession No: AF022830), 259 of the MRP1 gene (Accession No: AF022831), 381 of the MRP1 gene (Accession No: U07050), or an insertion of a T at a position corresponding to position 926/927 of the MRP1 gene (Accession No: U07050);
[0066] (e) a polynucleotide encoding an MRP1 polypeptide or fragment thereof, wherein said polypeptide comprises an amino acid substitution at a position corresponding to position 329 of the MRP1 polypeptide (Accession No: G2828206); and
[0067] (f) a polynucleotide encoding an MRP1 polypeptide or fragment thereof, wherein said polypeptide comprises an amino acid substitution of Phe to Cys at a position corresponding to position 329 of the MRP1 polypeptide (Accession No: G2828206).

[0068] The explanations and interpretations of the terms made above can be applied mutatis mutandis.

[0069] The present invention also relates to a method of treating colorectal cancer, cervical cancer, gastric cancer, lung cancer, malignant glioma, ovarian cancer, and pancreatic cancer comprising:
[0070] (a) determining the presence or absence of a variant allele comprising a polynucleotide referred to herein; and
[0071] (b) administering to a subject a therapeutically effective dosage of irinotecan.

[0072] The definitions used in accordance with the use of the present invention apply mutatis mutandis to the above method. Further, all embodiments described in accordance with the use of the present invention can be applied mutatis mutandis to the method of the present invention. Moreover, also encompassed by the method of the present invention are any further developments of said method which the person skilled in the art can make without undue burden based on its knowledge and the prior art, such as those documents referred to throughout this specification.

[0073] In a preferred embodiment of the use of the present invention a nucleotide deletion, addition and/or substitution comprised by said polynucleotide results in an altered expression of the variant allele compared to the corresponding wild type allele.

[0074] As discussed above, the alleles referred to in accordance with the use of the present invention correspond to the MRP1 gene. It is well known in the art that genes comprise structural elements which encode an amino acid sequence as well as regulatory elements which are involved in the regulation of the expression of said genes. Structural elements are represented by exons which may either encode an amino acid sequence or which may code for RNA which is not encoding an amino acid sequence but is nevertheless involved in RNA function, e.g. by regulating the stability of the RNA or the nuclear export of the RNA.

[0075] Regulatory elements of a gene may comprise promoter elements or enhancer elements both of which could be involved in transcriptional control of gene expression. It is very well known in the art that a promoter is to be found upstream of the structural elements of a gene. Regulatory elements such as enhancer elements, however, can be found distributed over the entire locus of a gene. Said elements could reside, e.g., in introns, regions of genomic DNA which separate the exons of a gene. Promoter or enhancer elements correspond to polynucleotide fragments which are capable of attracting or binding polypeptides involved in the regulation of the gene comprising said promoter or enhancer elements. For example, polypeptides involved in regulation of said gene comprise the so called transcription factors.

[0076] Said introns may comprise further regulatory elements which are required for proper gene expression. Introns are usually transcribed together with the exons of a gene resulting in a nascent RNA transcript which contains both, exon and intron sequences. The intron encoded RNA sequences are usually removed by a process known as RNA splicing. However, said process also requires regulatory sequences present on a RNA transcript said regulatory sequences may be encoded by the introns.

[0077] In addition, besides their function in transcriptional control and control of proper RNA processing and/or stability, regulatory elements of a gene could be also involved in the control of genetic stability of a gene locus. Said elements control, e.g., recombination events or serve to maintain a certain structure of the DNA or the arrangement of DNA in a chromosome.

[0078] Therefore, single nucleotide polymorphisms can occur in exons of an allele of a gene which encode an amino acid sequence as discussed supra as well as in regulatory regions which are involved in the above discussed process. The polymorphisms comprised by the polynucleotides referred to in accordance with the use of the present invention can influence the expression level of MRP1 protein via mechanisms involving enhanced or reduced transcription of the MRP1 gene, stabilization of the gene's RNA transcripts and alteration of the processing of the primary RNA transcripts.

[0079] Methods for the determination of an altered expression of a variant allele when compared to its wild type counterpart are well known in the art and comprise inter alia those referred to herein above, e.g., PCR based techniques, RFLP-based techniques, DNA sequencing-based techniques, hybridization techniques, Single strand conformational polymorphism (SSCP), denaturating gradient gel electrophoresis (DGGE), mismatch cleavage detection, heteroduplex analysis, techniques based on mass spectroscopy, HPLC-based techniques, primer extension-based techniques, and 5′-nuclease assay-based techniques. It might be necessary to obtain a sample comprising biological material, such as isolated cells or tissue from the subject prior to perform said methods for determination of the expression levels of the wild type and the variant alleles, respectively. An altered expression in accordance with the use of the present invention means that the expression of the wild type allele differs significantly from the expression of the variant allele. A significant difference can be determined by standard statistical methods, such as Student's t-test, chi²-test or the U-test according to Mann and Whitney. Moreover, the person skilled in the art can adopt these and other statistical method known in the art individually without an undue burden.

[0080] In a more preferred embodiment of the use of the invention said altered expression is decreased or increased expression.

[0081] To determine whether the expression of an allele referred to in accordance to the present invention is increased or decreased in comparison to the corresponding wild type allele well known methods such as PCR based techniques, RFLP-based techniques, DNA sequencing-based techniques, hybridization techniques, Single strand conformational polymorphism (SSCP), denaturating gradient gel electrophoresis (DGGE), mismatch cleavage detection, heteroduplex analysis, techniques based on mass spectroscopy, HPLC-based techniques, primer extension-based techniques, and 5′-nuclease assay-based techniques can be applied. As discussed above, it might be necessary to obtain a sample comprising cells or tissue from the subject in order to determine the expression level of the variant allele referred to in the use of the invention. A decrease or increase of the expression is characterized by a significant difference in the expression level of the variant versus the wild type allele in those assays. Also encompassed by decreased expression is the absence detectable expression of a variant allele.

[0082] In a furthermore preferred embodiment of the use of the present invention a nucleotide deletion, addition and/or substitution comprised by said polynucleotide results in an altered activity of the polypeptide encoded by the variant allele compared to the polypeptide encoded by the corresponding wild type allele.

[0083] As discussed supra, the variant alleles comprising those polynucleotides specified herein which correspond to coding regions of the MRP1 gene effect the amino acid sequences of the polypeptides encoded by said variant alleles. The variant polypeptides, therefore, exhibit altered biological and/or immunological properties when compared to their corresponding wild type counterpart. Preferred variant polypeptides in accordance with the use of the invention are those, which exhibit an altered biological activity, i.e. altered enzymatic function resulting in reduced, enhanced or complete loss of catalytic activity or altered transport function resulting in reduced, enhanced or complete loss of transport activity or altered binding to receptors or other drug targets resulting in altered activation of signal transduction pathways or altered inhibition of transporter or enzyme function. It might be necessary to obtain a sample comprising biological material such as isolated cells or tissue from the subject prior to perform said methods for determination of the activities of the wild type and the variant polypeptides, respectively. Whether a variant polypeptide has an altered activity or level of expression compared to its wild type corresponding counterpart can be determined by standard techniques well known in the art. Such standard techniques may comprise, e.g., ELISA based assays, RIA based assays, HPLC-based assays, mass spectroscopy-based assays, western blot analysis or assays which are known in the art and described in [Keppler, et al., 1997, Biol Chem 378:787-91, Suzuki, et al., 1994, Adv Prostaglandin Thromboxane Leukot Res 22:83-9, Scheffer, et al., 2000, Cancer Res 60:5269-77, Konig, et al., 1999, Biochim Biophys Acta 1461:377-94, Kool, et al., 1997, Cancer Res 57:3537-47, Bakos, et al., 2000, Mol Pharmacol 57:760-8, Keppler, et al., 1998, Chem Biol Interact 112:153-61, Leier, et al., 2000, Kidney Int 57:1636-42, Evers, et al., 2000, Br J Cancer 83:366-74, Evers, et al., 2000, Br J Cancer 83:375-83] for MRP1.

[0084] An altered activity in accordance with the use of the present invention means that the activity of the wild type polypeptide differs significantly from the variant polypeptide. A significant difference can be determined by standard statistical methods referred to herein above.

[0085] Most preferably, said altered activity is decreased or increased activity. As discussed for the increase or decrease of expression, a decrease or increase of the activities is characterized by a significant difference in the activity of the variant versus the wild type polypeptide in the assays referred to herein. Also encompassed by decreased activity is the absence detectable activity of a variant allele.

[0086] Moreover, in a further preferred embodiment of the use of the present invention said subject is an animal.

[0087] As described supra, the subject in accordance with the use of the present invention encompasses animals. The term “animal” as used herein encompasses all animals, preferably animals belonging to the vertebrate family, more preferably mammals. Moreover, the animals can be genetically engineered by well known techniques comprising transgenesis and homologous recombination in order to incorporate one or more of the polynucleotides referred to supra into the genome of said animals. Said animals comprising the genetically engineered animals can be used to study the pharmacological effects of drugs or pro-drugs which are based on the substances or derivatives thereof referred to herein, preferably irinotecan.

[0088] In accordance with the foregoing, most preferably, said animal is a mouse or rat.

[0089] Said animals are particularly well suited for assaying the pharmacological properties of the substances or derivatives referred to in accordance with the use of the present invention as described in detail in Giovanella, et al., 1991, Cancer Res 51:3052-5, Kunimoto, et al., 1987, Cancer Res 47:5944-7, Kaneda, et al., 1990, Cancer Res 50:1715-20.

[0090] Preferably, said mouse is lacking functional MRP1. It is well known in the art how said mice lacking functional cytochrome P450, MRP1 or MDR1 can be obtained. For instance said mice might be generated by homologous recombination as described for MRP1 in Rappa, et al., 2000, Biochemistry 39:3304-10, in Schinkel, 1998, Int J Clin Pharmacol Ther 36:9-13, Schinkel, et al., 2000, Pharmacogenetics 10:583-90.

[0091] Moreover, in another preferred embodiment of the use of the present invention said subject is a human.

[0092] In particular, the present invention is applicable to humans as is evident from the above. The use of the present invention is to be applied in order to treat or prevent side effects in patients which suffer from colorectal cancer, cervical cancer, gastric cancer, lung cancer, malignant glioma, ovarian cancer, and pancreatic cancer. The pharmacological effects of the above substances or derivatives thereof are well described in humans. However, the conventional therapies do not take into account the individual genetic makeup of the patient. Ethnical populations have different genetic backgrounds, which can also influence the function or regulation of a variant allele and thereby alter the pharmacological response of a patient to a substance or derivative used as a basis for a drug or pro-drug in accordance with the invention.

[0093] In light of the foregoing, most preferably, said human is African or Asian.

[0094] The Asian population (16%) who shows compared to Caucasians (39%) a lower frequency of the UGT1A1 low expresser genotype (homozygously wildtype at positions corresponding to positions 174990 to 174993 of the UGT1A1 gene Acc. No. GI:11118740) and is therefore less likely to suffer from irinotecan toxicity. On the other hand, this allele is more common in Africans (43%) who have additionally another low expressor allele (insertion of TA at positions corresponding to positions 174989/174990 of the UGT1A1 gene Acc. No. GI:11118740) the homozygous genotype of which occurs in 7%. Africans are therefore more susceptible to irinotecan-related adverse events (population frequency data are from [Beutler, et al., 1998, Proc Natl Acad Sci U S A 95:8170-4, Lampe, et al., 1999, Pharmacogenetics 9:341-9, Hall, et al., 1999, Pharmacogenetics 9:591-9]).

[0095] The present invention also relates to a method for selecting a suitable therapy for a subject suffering from colorectal cancer, cervical cancer, gastric cancer, lung cancer, malignant glioma, ovarian cancer, and pancreatic cancer, wherein said method comprises:
[0096] (a) determining the presence or absence of a variant allele referred to above in the genome of a subject in a sample obtained from said subject; and
[0097] (b) selecting a suitable therapy for said subject based on the results obtained in (a).

[0098] The definitions and explanations of the terms made above apply mutatis mutandis to the above method.

[0099] The term “suitable therapy” as used herein means that a substance according to the invention is selected and said substance being administered in a certain dosage to a subject, wherein said substance and said dosage are selected based on the knowledge of the presence or absence of a variant allele referred to in accordance with the use of the invention. Said substance and said dosage of the substance are selected in a way that on one hand they are most effective in treating colorectal cancer, cervical cancer, gastric cancer, lung cancer, malignant glioma, ovarian cancer, and pancreatic cancer on the other hand they do not cause toxic or undesirable side effects.

[0100] As is evident from the above, a prerequisite for selecting a suitable therapy is the knowledge of the presence or absence of a variant allele referred to in accordance with the use of the invention. Therefore, the method of the present invention encompasses the determination of the presence or absence of said variant alleles in a sample which has been obtained from said subject. The sample which is obtained by the subject comprises biological material which is suitable for the determination of the presence or absence of said variant alleles, such as isolated cells or tissue. Methods for the determination of the presence or absence of the variant alleles of the method of the invention comprise those methods referred to herein above.

[0101] Thanks to the method of the present invention, it is possible to efficiently select a suitable therapy for a subject, preferably a human, suffering from colorectal cancer, cervical cancer, gastric cancer, lung cancer, malignant glioma, ovarian cancer, and pancreatic cancer Thereby, mistreatment of patients based on wrong medications and the results thereof, such as development of resistance towards cancer therapy, and subsequent increased costs in health care, can be efficiently avoided. Furthermore, patients that are at high risk can be excluded from therapy prior to the first dose and/or dosage can be adjusted according to the individual's genetic makeup prior to the onset of drug therapy. Also, inhibitors for the mentioned transporter genes (e.g. MRP1) can be applied in genetically defined patient subpopulations. Thus, adverse effects can be avoided and the optimal drug level can be reached faster without time-consuming and expensive drug monitoring-based dose finding. This can reduce costs of medical treatment and indirect costs of disease (e.g. shorter time and less frequent hospitalization of patients).

[0102] The following 27 items are also encompassed by the present invention. The definitions and explanations made supra apply mutatis mutandis to the terms used to characterize the items.

[0103] 1. A method of using irinotecan to treat a patient suffering from cancer which comprises:
[0104] (1) determining if the patient has one or more variant alleles of the MRP1 gene in the cancerous tissue;
[0105] (2) in a patient having one or more of such variant alleles, administering to the patient an amount of irinotecan which is sufficient to treat a patient having such variant alleles which amount is increased or decreased in comparison to the amount that is administered without regard to the patient's alleles in the MRP1 gene.

[0106] 2. The method of item 1 wherein the cancer is colorectal cancer, cervical cancer, gastric cancer, lung cancer, malignant glioma, ovarian cancer, or pancreatic cancer.

[0107] 3. The method of item 2 in which:
[0108] (1) the one or more variant alleles result in the patient expressing low amounts of the MRP1 gene product, whereby the amount of irinotecan administered to the patient is decreased to avoid toxicity; or
[0109] (2) the one or more variant alleles result in the patient expressing high amounts of the MRP1 gene product, whereby the amount of irinotecan administered to the patient is increased to enhance efficacy.

[0110] 4. The method of item 3 wherein the one or more variant alleles are in the promoter region of the MRP1 gene.

[0111] 5. The method of item 3 wherein the one or more variant alleles are in the coding region of the MRP1 gene.

[0112] 6. The method of item 3 wherein the one or more variant alleles are not in either the promoter region or the coding region of the MRP1 gene.

[0113] 7. The method of item 3 wherein the one or more variant alleles are in both the promoter region and the coding region of the MRP1 gene.

[0114] 8. The method of item 3 wherein the one or more variant alleles comprises a polynucleotide selected from the group consisting of:
[0115] (a) a polynucleotide having the nucleic acid sequence of any one of SEQ ID NOs:169, 170, 173, 174, 177, 178, 181, 182, 185, 186, 189, 190, 193, 194, 197, 198, 201, 202, 205, 206, 209, 210, 213, 214, 217, 218, 221, 222, 225, 226, 229, 230, 233, 234, 237, 238, 241, 242, 245, 246, 249, 250, 253, 254, 257, 258, 261, 262, 265, 266, 269, 270, 273, 274, 277, 278, 281, 282, 285, 286, 289, 290, 293, 294, 297, 298, 301, 302, 305, 306, 309, 310, 313, 314, 317, 318, 321, 322, 325, 326, 329, 330, 333 and/or 334;
[0116] (b) a polynucleotide encoding a polypeptide having the amino acid sequence of any one of SEQ ID NOs: 600, 602 and/or 604;
[0117] (c) a polynucleotide capable of hybridizing to a Multidrug Resistance Protein 1 (MRP1) gene, wherein said polynucleotide is having at a position corresponding to positions 57998, 57853, 53282, and/or 39508 of the MRP1 gene (Accession No: GI:7209451), a substitution or deletion of at least one nucleotide or at a position corresponding to positions 137667, 137647, 137710, 124667, and/or 38646 of the MRP1 gene (Accession No: AC026452), a substitution or deletion of at least one nucleotide or at a position corresponding to positions 27258, 27159, 34218, 34215, 55472, and/or 34206 to 34207 of the MRP1 gene (Accession No: AC003026), a substitution or deletion of at least one nucleotide or at a position corresponding to positions 21133, 14008, 18067, 17970, 17900, and/or 18195 of the MRP1 gene (Accession No: U91318), a substitution or deletion of at least one nucleotide or at a position corresponding to positions 79, 88, and/or 249 of the MRP1 gene (Accession No: AF022830), a substitution or deletion of at least one nucleotide or at a position corresponding to positions 95 and/or 259 of the MRP1 gene (Accession No: AF022831), a substitution or deletion of at least one nucleotide or at a position corresponding to positions 150727 and/or 33551 of the MRP1 gene (Accession No: AC025277), a substitution or deletion of at least one nucleotide or at a position corresponding to position 174 of the MRP1 gene (Accession No: AF022828), a substitution or deletion of at least one nucleotide or at a position corresponding to positions 248 and/or 258 of the MRP1 gene (Accession No: AF022829), a substitution or deletion of at least one nucleotide or at a position corresponding to positions 1884, 1625, 1163, 381, 233, 189, 440, and/or 1720 to 1723 of the MRP1 gene (Accession No: U07050), a substitution or deletion of at least one nucleotide or at a position corresponding to positions 926927 and/or 437/438 of the MRP1 gene (Accession No: U07050) a insertion of at least one nucleotide or at a position corresponding to position 55156/55157 of the MRP1 gene (Accession No: AC003026) a insertion of at least one nucleotide;
[0118] (d) a polynucleotide capable of hybridizing to a MRP1 gene, wherein said polynucleotide is having at a position corresponding to position 21133, 14008 and/or 18195 of the MRP1 gene (Accession No: U91318) or at a position corresponding to position 27258 and/or 34218 of the MRP1 gene (Accession No: AC003026) or at a position corresponding to position 79 of the MRP1 gene (Accession No: AF022830) or at a position corresponding to position 57998, and/or 57853 of the MRP1 gene (Accession No: GI:7209451) or at a position corresponding to position 137667 and/or 137647 of the MRP1 gene (Accession No: AC026452) or at a position corresponding to position 150727 and/or 33551 of the MRP1 gene (Accession No: AC025277) or at a position corresponding to position 248 of the MRP1 gene (Accession No: AF022829) or at a position corresponding to position 1884, 1625, 233, and/or 189 of the MRP1 gene (Accession No: U07050) an A, at a position corresponding to position 39508 of the MRP1 gene (Accession No: GI:7209451) or at a position corresponding to position 17900, 18067 and/or 18195 of the MRP1 gene (Accession No: U91318) or at a position corresponding to position 174 of the MRP1 gene (Accession No: AF022828) or at a position corresponding to position 440 and/or 1163 of the MRP1 gene (Accession No: U07050) a T, at a position corresponding to position 88 of the MRP1 gene. (Accession No: AF022830) or at a position corresponding to position 95 of the MRP1 gene (Accession No: AF022831) or at a position corresponding to position 27159, 55472 and/or 34215 of the MRP1 gene (Accession No: AC003026) or at a position corresponding to position 124667 and/or 38646 of the MRP1 gene (Accession No: AC026452) or at a position corresponding to position 53282 of the MRP1 gene (Accession No: GI:7209451) or at a position corresponding to position 137710 of the MRP1 gene (Accession No: AC026452) a C, at a position corresponding to position 249 of the MRP1 gene (Accession No: AF022830) or at a position corresponding to position 258 of the MRP1 gene (Accession No: AF022829) or at a position corresponding to position 259 of the MRP1 gene (Accession No: AF022831) or at a position corresponding to position 381 of the MRP1 gene (Accession No: U07050) a G, at a position corresponding to position 17970 of the MRP1 gene (Accession No: U91318) a deletion of a T or at a position corresponding to position 34206 to 34207 of the MRP1 gene (Accession No: AC003026) a deletion of a AT or at a position corresponding to position 1720 to 1723 of the MRP1 gene (Accession No: U07050) a deletion of GGTA, at a position corresponding to position 926/927 a insertion of a T and/or 437/438 of the MRP1 gene (Accession No: U07050) a insertion of a TCCTTCC, at a position corresponding to position 55156/55157 of the MRP1 gene (Accession No: AC003026) a insertion of TGGGGC;
[0119] (e) a polynucleotide encoding an MRP1 polypeptide or fragment thereof, wherein said polypeptide comprises an amino acid substitution at a position corresponding to positions 600, 602, and/or 604 of the MRP1 polypeptide (Accession No: G2828206);
[0120] (f) a polynucleotide encoding an MRP1 polypeptide or fragment thereof, wherein said polypeptide comprises an amino acid substitution of Phe to Cys at a position corresponding to position 239 of the MRP1 polypeptide (Accession No: G2828206) or/and Arg to Ser at a position corresponding to position 433 of the MRP1 polypeptide (Accession No: G2828206) or/and Arg to Gin at a position corresponding to position 723 of the MRP1 polypeptide (Accession No: G2828206);

[0121] 9. The method of item 8 wherein the one or more variant alleles comprises a polynucleotide selected from the group consisting of:
[0122] (a) a polynucleotide having the nucleic acid sequence of any one of SEQ ID NO: 181, 209, 217, 205, 277, 281, 301, 325, 229, 193, 313, 293 or 253:
[0123] (b) a polynucleotid encoding a polypeptide having the amino acid sequence of SEQ ID NO: 600;
[0124] (c) a polynucleotide capable of hybridizing to a MRP1 gene, wherein said polynucleotide is having a substitution at a position corresponding to position 137647 of the MRP1 gene (Accession No: AC026452), 95 of the MRP1 gene (Accession No: AF022831), 53282 of the MRP1 gene (Accession No: GI:7209451), 249 of the MRP1 gene (Accession No: AF022830), 259 of the MRP1 gene (Accession No: AF022831),124667 of the MRP1 gene (Accession No: AC026452), 381, 440, 1625 of the MRP1 gene (Accession No: U07050), 34218 of the MRP1 gene (Accession No: AC003026), 18067 or 17900 of the MRP1 gene (Accession No: U91318) or an insertion of at least one nucleotide at a position corresponding to position 926/927 of the MRP1 gene (Accession No: U07050);
[0125] (d) a polynucleotide capable of hybridizing to a MRP1 gene, wherein said polynucleotide is having a T at a position corresponding to position 137647 of the MRP1 gene (Accession No: AC026452), 18067 or 17900 of the MRP1 gene (Accession No: U91318), 440 of the MRP1 gene (Accession No: U07050), a C at a position corresponding toposition 95 of the MRP1 gene (Accession No: AF022831), 124667 of the MRP1 gene (Accession No: AC026452), a G at a position corresponding to position 53282 of the MRP1 gene (Accession No: GI:7209451), 249 of the MRP1 gene (Accession No: AF022830), 259 of the MRP1 gene (Accession No: AF022831), 381 of the MRP1 gene (Accession No: U07050), or an A at a position corresponding to position 34218 of the MRP1 gene (Accession No: AC003026) or 1625 of the MRP1 gene (Accession No: U07050) or an insertion of a T at a position corresponding to position 926/927 of the MRP1 gene (Accession No: U07050);
[0126] (e) a polynucleotide encoding an MRP1 polypeptide or fragment thereof, wherein said polypeptide comprises an amino acid substitution at a position corresponding to position 329 of the MRP1 polypeptide (Accession No: G2828206); and
[0127] (f) a polynucleotide encoding an MRP1 polypeptide or fragment thereof, wherein said polypeptide comprises an amino acid substitution of Phe to Cys at a position corresponding to position 329 of the MRP1 polypeptide (Accession No: G2828206).

[0128] 10. The method of item 8 in which the one or more variant alleles results in the patient expressing low amounts of the MRP1 gene product, whereby the amount of irinotecan administered to the patient is decreased.

[0129] 11. The method of item 8 in which the one or more variant alleles results in the patient expressing high amounts of the MRP1 gene product, whereby the amount of irinotecan administered to the patient is increased.

[0130] 12. The method of item 9 in which the one or more variant alleles results in the patient expressing low amounts of the MRP1 gene product, whereby the amount of irinotecan administered to the patient is decreased.

[0131] 13. The method of item 9 in which the one or more variant alleles results in the patient expressing high amounts of the MRP1 gene product, whereby the amount of irinotecan administered to the patient is increased.

[0132] 14. A method for determining whether a patient is at risk for a toxic reaction to treatment with irinotecan which comprises determining if the patient has one or more variant alleles of the MRP1 gene.

[0133] 15. The method of item 14 which further comprises administering to the patient reduced amounts of irinotecan.

[0134] 16. A method for determining the optimum treatment regimen for administering irinotecan to a patient suffering from cancer which comprises:
[0135] (1) determining if the patient has one or more variant alleles of the MRP1 gene;
[0136] (2) in a patient having one or more of such alleles increasing or decreasing the amount of irinotecan in comparison to the amount that is administered without regard to the patient's alleles in the MRP1 gene.

[0137] 17. A method of treating cancer in a patient having one or more variant alleles of the MRP1 gene such that expression levels of the MRP1 gene product are lower than in the general population and so indicates high sensitivity to irinotecan which comprises administering to the patient a decreased amount of irinotecan.

[0138] 18. A method of treating cancer in a patient having one or more variant alleles of the MRP1 gene such that expression levels of the MRP1 gene product are higher than in the and so indicates resistance or predisposition to resistance to irinotecan which comprises administering to the patient an increased amount of irinotecan.

[0139] 19. The method of item 18 in which patients that have a variant allele that indicates resistance or predisposition to resistance are treated with an MRP1 inhibitor.

[0140] 20. The method of item 19 wherein the MRP1 inhibitor is selected from the group consisting of: SDZ-PSC 833, SDZ 280-446, MK571, MS209 (quinolone derivative), PAK-104p, Verapamil, Benzbromarone, Dipyridamole, Furosemide, Gamma-GS(naphtyl)cysteinyl-glycine diethyl ester, Genistein, Quinidine, Rifampicin, RU 486, Sulfinpyrazone.

[0141] 21. The method of item 17 which further comprises monitoring the patient during treatment by assaying for changes in expression levels of the MRP1 gene product in the cancerous cells whereby an increase in the expression level of the MRP1 gene product is compensated for by an increase in the amount of irinotecan administered to the patient.

[0142] 22. A method of treating cancer in a patient which comprises internally administering to the patient an effective amount of irinotecan, wherein the treatment regimen is modified based upon the genotype of the patient's MRP1 gene.

[0143] 23. A method of treating a population of patients suffering from cancer which comprises:
[0144] (1) determining, on a patient by patient basis, if the patient has one or more variant alleles of the MRP1 gene;
[0145] (2) in a patient having one or more of such variant alleles, administering to the patient an amount of irinotecan which is sufficient to treat a patient having such variant alleles which amount is increased or decreased in comparison to the amount that is administered without regard to the patient's alleles in the MRP1 gene.

[0146] 24. A method for predicting sensitivity to irinotecan in a patient suffering from cancer which comprises determining if the patient has one or more variant alleles of the MRP1 gene, which alleles indicate that the cancerous cells express low or high amounts of the MRP1 gene product, whereby low expression indicates high sensitivity to irinotecan and high expression indicates resistance or predisposition to resistance to irinotecan.

[0147] 25. The method of item 24 in which patients that have a genotype that indicates resistance or predisposition to resistance are treated with a MRP1 inhibitor.

[0148] 26. The method of item 25 wherein the MRP1 inhibitor is selected from the group consisting of: SDZ-PSC 833, SDZ 280-446, MK571, MS209 (quinolone derivative), PAK-104p, Verapamil, Benzbromarone, Dipyridamole, Furosemide, Gamma-GS(naphtyl)cysteinyl-glycine diethyl ester, Genistein, Quinidine, Rifampicin, RU 486, Sulfinpyrazone.

[0149] 27. The method of item 26 wherein the patients that have a genotype that indicates resistance or predisposition to resistance are monitored during treatment by assaying for expression levels of the MRP1 gene product in the cancerous cells.

[0150] The decreased expression as referred to herein above includes in addition to a significantly decreased amount of transcripts encoding a functional gene product also a normal or even elevated amount of transcripts encoding a gene product which has no activity or a significantly decreased activity.

[0151] By “in comparison to the amount that is administered without regard to the patient's alleles in the MDR1 gene” a standard dose is meant which is routinely administered to patients in need thereof without regarding the genotype. Such a general population of patients is considered as having the normal genotype, i.e. wildtype genotype.

[0152] Further, the present invention encompasses a method for improving and/or modifying a therapy comprising determining the expression levels of MRP1, hereinafter referred to as expression profile or the protein level of the MRP1 protein, hereinafter referred to as the protein profile, or the activity level of the said protein, hereinafter referred to as the activity profile.

[0153] The term “expression level” as referred to in the context of the present invention means the detectable amount of transcripts of the MRP1 gene relative to the amount of transcripts for a housekeeping gene, such as PLA2. The amount of transcripts can be determined by standard molecular biology techniques including Northern analysis, RNAse protection assays, PCR based techniques encompassing Taq-Man analysis. Preferably, the determination can be carried out as described in the accompanied Examples 4 and 5. The term “expression profile” means that the expression level of a panel of the aforementioned genes is determined and the expression levels are compared to a reference standard. As a reference standard, preferably transcripts are obtained from cells or tissues of a subject having the aforementioned wildtype alleles of the respective genes in their genomes.

[0154] The term “protein level” refers to the detectable amount of MRP1 relative to the amount of a protein encoded by a housekeeping gene, such as PLA2. The amount of proteins can be determined by standard biochemical techniques, such as Western analysis, ELISA, RIA or other antibody based techniques known in the art. The term “protein profile” means that the protein level of a panel of the aforementioned proteins is determined and the protein levels are compared to a reference standard. As a reference standard, preferably proteins are obtained from cells or tissues of a subject having the aforementioned wildtype alleles of the respective genes in their genomes.

[0155] The term “activity level” means the detectable biological activity of MRP1 relative to the activity or amount of a encoded by the allellic variants of the gene as disclosed in the present invention relative to the activity of the protein encoded by the corresponding wild-type allele of the gene. Biological assays for the aforementioned proteins are well known in the art and described in Hallo et al., Anticancer Res. 1998, 18:2981-7. As a reference standard, preferably proteins are obtained from cells or tissues of a subject having the aforementioned wildtype alleles of the respective genes in their genomes.

[0156] The aforementioned methods, preferably, comprise the steps (i) obtaining a tumor sample from a patient during specific stages of a tumor therapy; and (ii) determining the expression profile, protein profile or activity profile for MRP1. Based on the expression profiles a clinician can efficiently adapt the therapy. This comprises inter alia dosage adjustment and/or including administration of an MRP1 inhibitor. Preferably, said inhibitor is selected from the following group of inhibitors: SDZ-PSC 833, SDZ 280-446, MK571, MS209 (quinolone derivative), PAK-104p, Verapamil, Benzbromarone, Dipyridamole, Furosemide, Gamma-GS(naphtyl)cysteinyl-glycine diethyl ester, Genistein, Quinidine, Rifampicin, RU 486, Sulfinpyrazone, tricyclic isoxazole (e.g. LY 402913) (http://bigfoot.med.unc.edu/watkinsLab/intesinfo.htm, Paul Watkins, University of North Carolina).

[0157] Finally, the present invention encompasses a method for determining whether a patient has developed a resistance against the drugs referred to in the context of the present invention. Said method comprising the steps of (i) obtaining a tumor sample from a patient during specific stages of a tumor therapy; and (ii) determining the expression level of MRP1. The expression of said gene can be determined as described in Examples 4 and 5 or as described above. Based on the evaluation of said expression profile, a clinician can more efficiently adapt the therapy. This comprises inter alia dosage adjustment and/or including administration of an MRP1 inhibitor as defined supra.

[0158] Each of the documents cited herein (including any manufacturer's specifications, instructions, etc.) are hereby incorporated by reference.

[0159] The nucleic acid and amino acid sequences referred to in this application by sequence identification numbers (SEQ ID NOs.) are listed in the following Tables 1 2, 3 and 4. For positions of polymorphic nucleotides, the following substitute letters are used in the nucleic acid sequences: R, G or A; Y, T or C; M, A or C; K, G or T; S, G or C; W, A or T.

[0160] Amino acid sequences are shown in the one letter code. The letter X at polymorphic amino acid positions represents the modified amino acid or its corresponding wild type amino acid (see accession numbers).

[0161] Moreover, all nucleic acid and amino acid sequences referred to herein by making reference to GenBank accession numbers are shown in FIGS. 4 to 29 below

TABLE 1

The nucleic acid and amino acid sequences referred to in this application

| | | | | | |
|---|---|---|---|---|---|
| SEQ | SEQ | SEQ | Sequence | SEQ | Sequence |

| | | | | | | | | | |
|---|---|---|---|---|---|---|---|---|---|
| Vari- | Acc. | ID | Sequence | ID | Sequence | ID | wt > mut | ID | wt > mut |

| | | | | | | | | | | | |
|---|---|---|---|---|---|---|---|---|---|---|---|
| Gene | ation | SNP | no. | NO | forward | NO | reverse | NO | forward | NO | reverse |

| | | | | | | | | | | | |
|---|---|---|---|---|---|---|---|---|---|---|---|
| UGT1A1 | T > G | 59 | GI:8850235 | 001 | GTCCTGGGCCG | 002 | ACACAGCAGCC | 003 | GTCCTGGGCCK | 004 | ACACAGCAGCM |
| | | | | | GCTGCTGTGT | | GGCCCAGGAC | | GCTGCTGTGT | | GGCCCAGGAC |
| UGT1A1 | C > T | 160 | GI:8850235 | 005 | GGCCATCCAGT | 006 | TGCTGCAGCTA | 007 | GGCCATCCAGY | 008 | TGCTGCAGCTR |
| | | | | | AGCTGCAGCA | | CTGGATGGCC | | AGCTGCAGCA | | AGCTGCAGCA |
| UGT1A1 | G > A | 226 | GI:8850235 | 009 | CATCAGAGACA | 010 | TAAAATGCTCTG | 011 | CATCAGAGACR | 012 | TAAAATGCTCYG |
| | | | | | GAGCATTTTA | | TCTCTGATG | | GAGCATTTTA | | TCTCTGATG |
| UGT1A1 | T > A | 539 | GI:8850235 | 013 | TTGCATGCACA | 014 | GCTGCATGGCT | 015 | TTGCATGCACW | 016 | GCTGCATGGCK |
| | | | | | GCCATGCAGC | | GTGCATGCAA | | GCCATGCAGC | | GTGCATGCAA |
| UGT1A1 | T > C | 544 | GI:8850235 | 017 | TGCACTGCCAC | 018 | TCCAGGCTGCG | 019 | TGCACTGCCAY | 020 | TCCAGGCTGCR |
| | | | | | GCAGCCTGGA | | GTGCATGCAA | | GCAGCCTGGA | | GTGCATGCAA |
| UGT1A1 | C > T | 640 | GI:8850235 | 021 | CTTCCTGCAGT | 022 | TTCTTCACCCAC | 023 | CTTCCTGCAGY | 024 | TTCTTCACCCRC |
| | | | | | GGGTGAAGAA | | TGCAGGAAG | | GGGTGAAGAA | | TGCAGGAAG |
| UGT1A1 | C > A | 701 | GI:8850235 | 025 | GTTTATTCCCAG | 026 | GGTTGCATACT | 027 | GTTTATTCCCM | 028 | GGTTGCATACK |
| | | | | | TATGCAACC | | GGGAATAAAC | | GTATGCAACC | | GGGAATAAAC |
| UGT1A1 | G > C | 841 | GI:8850235 | 029 | GGTTTTTGTTCG | 030 | TTGATTCCACGA | 031 | GGTTTTTGTTSG | 032 | TTGATTCCACSA |
| | | | | | TGGAATCAA | | ACAAAAACC | | TGGAATCAA | | ACAAAAACC |
| UGT1A1 | C > A | 855 | GI:8850235 | 033 | GAATCAACTGA | 034 | TTTGGTGAAGT | 035 | GAATCAACTGM | 036 | TTTGGTGAAGK |
| | | | | | CTTCACCAAA | | CAGTTGATTC | | CTTCACCAAA | | CAGTTGATTC |
| UGT1A1 | C > T | 890 | GI:8850235 | 037 | GAATTTGAAGTC | 038 | ATTAATGTAGAC | 039 | GAATTTGAAGY | 040 | ATTAATGTAGRC |
| | | | | | TACATTAAT | | TTCAAATTC | | CTACATTAAT | | TTCAAATTC |
| UGT1A1 | G > A | 938 | GI:8850235 | 041 | TTCTCTTTGGAA | 042 | GACCATTGATTC | 043 | TTCTCTTTGGRA | 044 | GACCATTGATY |
| | | | | | TCAATGGTC | | CAAAGAGAA | | TCAATGGTC | | CCAAAGAGAA |
| UGT1A1 | C > T | 1006 | GI:8850235 | 045 | CAAAATCCCTTA | 046 | AGGACTGTCTA | 047 | CAAAATCCCTYA | 048 | AGGACTGTCTR |
| | | | | | GACAGTCCT | | AGGGATTTTG | | GACAGTCCT | | AGGGATTTTG |
| UGT1A1 | A > G | 1007 | GI:8850235 | 049 | AAAATCCCTCG | 050 | CAGGACTGTCC | 051 | AAAATCCCTCR | 052 | CAGGACTGTCY |
| | | | | | GACAGTCCTG | | GAGGGATTTT | | GACAGTCCTG | | GAGGGATTTT |
| UGT1A1 | G > A | 1020 | GI:8850235 | 053 | CAGTCCTGTGA | 054 | CAGTGTACCGT | 055 | CAGTCCTGTGR | 056 | CAGTGTACCGY |
| | | | | | CGGTACACTG | | CACAGGACTG | | CGGTACACTG | | CACAGGACTG |
| UGT1A1 | C > T | 1084 | GI:8850235 | 057 | GTGGCTACCCT | 058 | AGATCGTTTTAG | 059 | GTGGCTACCCY | 060 | AGATCGTTTTRG |
| | | | | | AAAACGATCT | | GGTAGCCAC | | AAAACGATCT | | GGTAGCCAC |
| UGT1A1 | A > G | 1085 | GI:8850235 | 061 | TGGCTACCCCG | 062 | CAGATCGTTTC | 063 | TGGCTACCCCR | 064 | CAGATCGTTTY |
| | | | | | AAACGATCTG | | GGGGTAGCCA | | AAACGATCTG | | GGGGTAGCCA |
| UGT1A1 | C > G | 1114 | GI:8850235 | 065 | CCCGATGACCG | 066 | ATAAAGGCACC | 067 | CCCGATGACCS | 068 | ATAAAGGCACS |
| | | | | | GTGCCTTTAT | | GGTCATCGGG | | GTGCCTTTAT | | GGTCATCGGG |
| UGT1A1 | G > A | 1117 | GI:8850235 | 069 | GATGACCCGTA | 070 | GTGATAAAGGT | 071 | GATGACCCGTR | 072 | GTGATAAAGGY |
| | | | | | CCTTTATCAC | | ACGGGTCATC | | CCTTTATCAC | | ACGGGTCATC |
| UGT1A1 | C > T | 1139 | GI:8850235 | 073 | CATGCTGGTTT | 074 | AACACCATGGA | 075 | CATGCTGGTTY | 076 | AACACCATGGR |
| | | | | | CCATGGTGTT | | AACCAGCATG | | CCATGGTGTT | | AACCAGCATG |
| UGT1A1 | C > G | 1158 | GI:8850235 | 077 | TTTATGAAAGGA | 078 | CATTGCATATCC | 079 | TTTATGAAAGSA | 080 | CATTGCATATSC |
| | | | | | TATGCAATG | | TTTCATAAA | | TATGCAATG | | TTTCATAAA |
| UGT1A1 | CC > | 1175 to | GI:8850235 | 081 | AATGGCGTTCG | 082 | TCATCACCATAC | 083 | AATGGCGTTCY | 084 | TCATCACCATSR |
| | GT | 1176 | | | TATGGTGATGA | | GAACGCCATT | | ATGGTGATGA | | GAACGCCATT |
| UGT1A1 | G > C | 1216 | GI:8850235 | 085 | GATGGACAATC | 086 | ATGCGCTTTGG | 087 | GATGGACAATS | 088 | ATGCGCTTTGS |
| | | | | | CAAAGCGCAT | | ATTGTCCATC | | CAAAGCGCAT | | ATTGTCCATC |
| UGT1A1 | A > G | 1297 | GI:8850235 | 089 | AAATGCTCTAGA | 090 | ATGACTGCTTCT | 091 | AAATGCTCTARA | 092 | ATGACTGCTTYT |
| | | | | | AGCAGTCAT | | AGAGCATTT | | AGCAGTCAT | | AGAGCATTT |
| UGT1A1 | A > T | 1324 | GI:8850235 | 093 | CAAAAGTTACTA | 094 | ATGTTCTCCTAG | 095 | CAAAAGTTACW | 096 | ATGTTCTCCTW |
| | | | | | GGAGAACAT | | TAACTTTTG | | AGGAGAACAT | | GTAACTTTTG |
| UGT1A1 | T > G | 1471 | GI:8850235 | 097 | CTGGTACCAGG | 098 | AAGGAATGGTC | 099 | CTGGTACCAGK | 100 | AAGGAATGGTM |
| | | | | | ACCATTCCTT | | CTGGTACCAG | | ACCATTCCTT | | CTGGTACCAG |
| UGT1A1 | C > T | 1478 | GI:8850235 | 101 | CAGTACCATTTC | 102 | CACGTCCAAGA | 103 | CAGTACCATTYC | 104 | CACGTCCAAGR |
| | | | | | TTGGACGTG | | AATGGTACTG | | TTGGACGTG | | AATGGTACTG |
| UGT1A1 | de/CT | 372 to | GI:8850235 | 105 | TAAAAAAGGAC | 106 | AGCATAGCAGT | 107 | TAAAAAAGGAnC | 108 | AGCATAGCAGn |
| | | 373 | | | TGCTATGCT | | CCTTTTTTA | | TGCTATGCT | | TCCTTTTTTA |
| UGT1A1 | de/TT | 523 to | GI:8850235 | 109 | GCCCACTGTAT | 110 | CATGCAAGAAT | 111 | GCCCACTGTAn | 112 | CATGCAAGAAnT |
| | C | 525 | | | TCTTGCATG | | ACAGTGGGC | | TTCTTGCATG | | ACAGTGGGC |
| UGT1A1 | del | 892 to | GI:8850235 | 113 | ATTTGAAGCCT | 114 | ATGTTCTCCAG | 115 | ATTTGAAGCCnT | 116 | ATGTTCTCCAnG |
| | TACA | 905 | | | GGAGAACAT | | GCTTCAAAT | | GGAGAACAT | | GCTTCAAAT |
| | TTA | | | | | | | | | | |
| | ATGC | | | | | | | | | | |
| | TTC | | | | | | | | | | |
| UGT1A1 | insT | 470/ | GI:8850235 | 129 | CTGACGGACCC | 130 | AAGGAAGGAAA | 131 | CTGACGGACCC | 132 | AAGGAAGGAAA |
| | | 471 | | | TTTTCCTTCCTT | | TGGGTCCGTCAG | | nTTTCCTTCCTT | | nGGGTCCGTCAG |
| UGT1A1 | insG | 1222/ | GI:8850235 | 133 | CAATGCAAAGC | 134 | AGTCTCCATGC | 135 | CAATGCAAAGC | 136 | AGTCTCCATGC |
| | | 1223 | | | GGCATGGAGACT | | CGCTTTGCATTG | | nGCATGGAGACT | | nGCTTTGCATTG |
| Cyp3A5 | T > C | 47518 | GI:10281451 | 137 | AAGGACTTCTA | 138 | TAGAAGTCCTT | 139 | AAGGAYTTCTA | 140 | TAGAARTCCTT |
| Cyp3A5 | T > G | 145601 | GI:11177452 | 141 | TGGGCGTGCAA | 142 | TTGCACGCCCA | 143 | TGGGCKTGCAA | 144 | TTGCAMGCCCA |
| Cyp3A5 | A > G | 145929 | GI:11177452 | 145 | GCCCCGCCTCC | 146 | GGAGGCGGGGC | 147 | GCCCCRCCTCC | 148 | GGAGGYGGGGC |
| Cyp3A5 | A > G | 9736 | GI:10281451 | 149 | CTCACGCTGGG | 150 | CCCAGCGTGAG | 151 | CTCACRCTGGG | 152 | CCCAGYGTCTC |
| MRP1 | G > A | 21133 | U91318 | 169 | CCCAAAACACA | 170 | GCAGGGTGTGT | 171 | CCCAAAACACR | 172 | GCAGGGTGTGY |
| | | | | | CACACCCTGC | | GTGTTTTGGG | | CACACCCTGC | | GTGTTTTGGG |
| MRP1 | G > T | 57998 | GI:7209451 | 173 | ACGCTCAGAGT | 174 | AGTCCATGAAA | 175 | ACGCTCAGAGK | 176 | AGTCCATGAAM |
| | | | | | TTCATGGACT | | CTCTGAGCGT | | TTCATGGACT | | CTCTGAGCGT |
| MRP1 | C > T | 137667 | AC026452 | 177 | GCAGGTGGCCT | 178 | AATGTGCACAA | 179 | GCAGGTGGCCY | 180 | AATGTGCACAR |
| | | | | | TGTGCACATT | | GGCCACCTGC | | TGTGCACATT | | GGCCACCTGC |
| MRP1 | C > T | 137647 | AC026452 | 181 | TTGCCGTCTAT | 182 | CAATGGTCACA | 183 | TTGCCGTCTAY | 184 | CAATGGTCACR |
| | | | | | GTGACCATTG | | TAGACGGCM | | GTGACCATTG | | TAGACGGCAA |
| MRP1 | G > A | 27258 | AC003026 | 185 | GATTCTCTCCAA | 186 | GATGTTTTCTTTG | 187 | GATTCTCTCCRA | 188 | GATGTTTTCTYG |
| | | | | | GAAAACATC | | GAGAGAATC | | GAAAACATC | | GAGAGAATC |
| MRP1 | G > A | 14008 | U91318 | 189 | CTGGGAAGTCA | 190 | GGGTCAGGGAT | 191 | CTGGGAAGTCR | 192 | GGGTCAGGGAY |
| | | | | | TCCCTGACCC | | GACTTCCCAG | | TCCCTGACCC | | GACTTCCCAG |
| MRP1 | C > T | 18067 | U91318 | 193 | CCACGGCAGCT | 194 | CCAGGTCCACA | 195 | CCACGGCAGCY | 196 | CCAGGTCCACR |
| | | | | | GTGGACCTGG | | GCTGCCGTGG | | GTGGACCTGG | | GCTGCCGTGG |
| MRP1 | G > A | 79 | AF022830 | 197 | CCAGGCAGCCA | 198 | CAACCTTCAC | 199 | CCAGGCAGCCR | 200 | CAACCTTCACY |
| | | | | | GTGAAGGTTG | | GGCTGCCTGG | | GTGAAGGTTG | | GGCTGCCTGG |
| MRP1 | T > C | 88 | AF022830 | 201 | CGGTGAAGGTC | 202 | AGGAGTACACG | 203 | CGGTGAAGGTY | 204 | AGGAGTACACR |
| | | | | | GTGTACTCCT | | ACCTTCACCG | | GTGTACTCCT | | ACCTTCACCG |
| MRP1 | T > G | 249 | AF022830 | 205 | CTCATGAGCTG | 206 | CTTGAAGAAGC | 207 | CTCATGAGCTK | 208 | CTTGAAGAAGM |
| | | | | | CTTCTTCAAG | | AGCTCATGAG | | CTTCTTCAAG | | AGCTCATGAG |
| MRP1 | T > C | 95 | AF022831 | 209 | AGTTCGTGAAC | 210 | CCTTCGTGTCG | 211 | AGTTCGTGAAY | 212 | CCTTCGTGTCR |
| | | | | | GACACGAAGG | | TTCACGAACT | | GACACGAAGG | | TTCACGAACT |
| MRP1 | C > T | 57853 | GI:7209451 | 213 | GGCAGTGGGCT | 214 | CCACTCCCTCA | 215 | GGCAGTGGGCY | 216 | CCACTCCCTCR |
| | | | | | GAGGGAGTGG | | GCCCACTGCC | | GAGGGAGTGG | | GCCCACTGCC |
| MRP1 | C > G | 53282 | GI:7209451 | 217 | GCCAGTTGGAG | 218 | CCCCAAGTGAC | 219 | GCCAGTTGGAS | 220 | CCCCAAGTGAS |
| | | | | | TCACTTGGGG | | TCCAACTGGC | | TCACTTGGGG | | TCCAACTGGC |
| MRP1 | A > G | 137710 | AC026452 | 221 | ACTCTCACTCG | 222 | TGCTGTGCCCC | 223 | ACTCTCACTCR | 224 | TGCTGTGCCCY |
| | | | | | GGGCACAGCA | | GAGTGAGAGT | | GGGCACAGCA | | GAGTGAGAGT |
| MRP1 | G > C | 27159 | AC003026 | 225 | TCGTTGATCACA | 226 | ACAGACAGATG | 227 | TCGTTGATCASA | 228 | ACAGACAGATS |
| | | | | | TCTGTCTGT | | TGATCAACGA | | TCTGTCTGT | | TGATCAACGA |
| MRP1 | G > A | 34218 | AC003026 | 229 | GTGCACTCACA | 230 | CACCCGGCCAT | 231 | GTGCACTCACR | 232 | CACCCGGCCAY |
| | | | | | TGGCCGGGTG | | GTGAGTGCAC | | TGGCCGGGTG | | GTGAGTGCAC |
| MRP1 | G > C | 34215 | AC003026 | 233 | CATGTGCACTC | 234 | CCGGCCACGTG | 235 | CATGTGCACTS | 236 | CCGGCCACGTS |
| | | | | | ACGTGGCCGG | | AGTGCACATG | | ACGTGGCCGG | | AGTGCACATG |
| MRP1 | G > A | 39508 | GI:7209451 | 237 | GTTTCGTTGTA | 238 | TCCCACCCCCT | 239 | GTTTCGTTGTR | 240 | TCCCACCCCCY |
| | | | | | GGGGGTGGGA | | ACAACGAAAC | | GGGGGTGGGA | | ACAACGAAAC |
| MRP1 | T > C | 55472 | AC003026 | 241 | TGTCTAATTACA | 242 | ATCCATTTCTGT | 243 | TGTCTAATTAYA | 244 | ATCCATTTCTRT |
| | | | | | GAAATGGAT | | AATTAGACA | | GAAATGGAT | | AATTAGACA |
| MRP1 | G > A | 150727 | AC025277 | 245 | CCATGTCAGCA | 246 | ACCTGTGTCAT | 247 | CCATGTCAGCR | 248 | ACCTGTGTCAY |
| | | | | | TGACACAGGT | | GCTGACATGG | | TGACACAGGT | | GCTGACATGG |
| MRP1 | de/T | 17970 | U91318 | 249 | CTGGTTTTTTCT | 250 | TGACCGGAAGA | 251 | CTGGTTTTTTnC | 252 | TGACCGGAAGn |
| | | | | | TCCGGTCA | | AAAAACCAG | | TTCCGGTCA | | AAAAAAACCAG |
| MRP1 | C > T | 17900 | U91318 | 253 | TGTCTCCTTTTG | 254 | TGGGAGAAGCA | 255 | TGTCTCCTTTYG | 256 | TGGGAGAAGCR |
| | | | | | CTTCTCCCA | | AAAGGAGACA | | CTTCTCCCA | | AAAGGAGACA |
| MRP1 | G > A | 18195 | U91318 | 257 | CACTGGCACAA | 258 | CTAGAGGCCAT | 259 | CACTGGCACAR | 260 | CTAGAGGCCAY |
| | | | | | TGGCCTCTAG | | TGTGCCAGTG | | TGGCCTCTAG | | TGTGCCAGTG |
| MRP1 | G > A | 33551 | AC025277 | 261 | TGTGACCACAA | 262 | ACACACTCATTT | 263 | TGTGACCACAR | 264 | ACACACTCATYT |
| | | | | | ATGAGTGTGT | | GTGGTCACA | | ATGAGTGTGT | | GTGGTCACA |
| MRP1 | C > T | 174 | AF022828 | 265 | CCAGGCCCCCT | 266 | CCTGAGGTCTA | 267 | CCAGGCCCCCY | 268 | CCTGAGGTCTR |
| | | | | | AGACCTCAGG | | GGGGGCCTGG | | AGACCTCAGG | | GGGGGCCTGG |
| MRP1 | C > A | 248 | AF022829 | 269 | CCTTTCCACTAC | 270 | GAGGCCACAGT | 271 | CCTTTCCACTM | 272 | GAGGCCACAGK |
| | | | | | TGTGGCCTC | | AGTGGAAAGG | | CTGTGGCCTC | | AGTGGAAAGG |
| MRP1 | C > G | 258 | AF022829 | 273 | CCTGTGGCCTG | 274 | ATCCTGGATTCA | 275 | CCTGTGGCCTS | 276 | ATCCTGGATTSA |
| | | | | | AATCCAGGAT | | GGCCACAGG | | AATCCAGGAT | | GGCCACAGG |
| MRP1 | A > G | 259 | AF022831 | 277 | AAGGTAGGGGG | 278 | TGGCACAGCGC | 279 | AAGGTAGGGGR | 280 | TGGCACAGCGY |
| | | | | | CGCTGTGCCA | | CCCCTACCTT | | CGCTGTGCCA | | CCCCTACCTT |
| MRP1 | T > C | 124667 | AC026452 | 281 | GCGTGCCCAGC | 282 | AAACCCCAGGG | 283 | GCGTGCCCAGY | 284 | AAACCCCAGGR |
| | | | | | CCTGGGGTTT | | CTGGGCACGC | | CCTGGGGTTT | | CTGGGCACGC |
| MRP1 | G > A | 1884 | U07050 | 285 | AGCCTTGGAGA | 286 | CACCCCAGATT | 287 | AGCCTTGGAGR | 288 | CACCCCAGATY |
| | | | | | ATCTGGGGTG | | CTCCAAGGCT | | ATCTGGGGTG | | CTCCAAGGCT |
| MRP1 | G > C | 38646 | AC026452 | 289 | CCTTAAACAGC | 290 | CTTTTCAAATGC | 291 | CCTTAAACAGSA | 292 | CTTTTCAAATSC |
| | | | | | ATTTGAAAAG | | TGTTTAAGG | | TTTGAAAAG | | TGTTTAAGG |
| MRP1 | C > A | 1625 | U07050 | 293 | GGGAATCACTA | 294 | CAGAGAGGTTT | 295 | GGGAATCACTM | 296 | CAGAGAGGTTK |
| | | | | | AACCTCTCTG | | AGTGATTCCC | | AACCTCTCTG | | AGTGATTCCC |
| MRP1 | C > T | 1163 | U07050 | 297 | TGTGATCGGCT | 298 | AGCCGAGGCGA | 299 | TGTGATCGGCY | 300 | AGCCGAGGCGR |
| | | | | | CGCCTCGGCT | | GCCGATCACA | | CGCCTCGGCT | | GCCGATCACA |
| MRP1 | A > G | 381 | U07050 | 301 | TGGGGGACCCG | 302 | TTTATTGGCCC | 303 | TGGGGGACCCR | 304 | TTTATTGGCCYG |
| | | | | | GGCCAATAAA | | GGGTCCCCCA | | GGCCAATAAA | | GGTCCCCCA |
| MRP1 | G > A | 233 | U07050 | 305 | AAGAGTAGCAA | 306 | CAAGATAAAATT | 307 | AAGAGTAGCAR | 308 | CAAGATAAAAYT |
| | | | | | TTTTATCTTG | | GCTACTCTT | | TTTTATCTTG | | GCTACTCTT |
| MRP1 | C > A | 189 | U07050 | 309 | AAAAAAATCCAA | 310 | TTTTTGGATTTG | 311 | AAAAAAATCCM | 312 | TTTTTGGATTKG |
| | | | | | ATCCAAAAA | | GATTTTTTT | | AATCCAAAAA | | GATTTTTTT |
| MRP1 | C > T | 440 | U07050 | 313 | CTCCTTCCCTTG | 314 | AGGACCTAGCA | 315 | CTCCTTCCCTY | 316 | AGGACCTAGCR |
| | | | | | CTAGGTCCT | | AGGGAAGGAG | | GCTAGGTCCT | | AGGGAAGGAG |
| MRP1 | de/AT | 34206 | AC003026 | 317 | AGTCTCACACG | 318 | GTGAGTGCACG | 319 | AGTCTCACACn | 320 | GTGAGTGCACn |
| | | to | | | TGCACTCAC | | TGTGAGACT | | GTGCACTCAC | | GTGTGAGACT |
| | | 34207 | | | | | | | | | |
| MRP1 | de/GG | 1720 to | U07050 | 321 | ACTCCAGGCAG | 322 | GAACGGAGCCT | 323 | ACTCCAGGCAn | 324 | GAACGGAGCCn |
| | TA | 1723 | | | GCTCCGTTC | | GCCTGGAGT | | GGCTCCGTTC | | TGCCTGGAGT |
| MRP1 | InsT | 926/ | U07050 | 325 | TTAATTTTTTTTT | 326 | AAATAATAATAA | 327 | TTAATTTTTTTTn | 328 | AAATAATAATnA |
| | | 927 | | | ATTATTATTT | | AAAAAAATTAA | | ATTATTATTT | | AAAAAAATTAA |
| MRP1 | InsTC | 437/ | U07050 | 329 | TTCCTCCTTCCT | 330 | ACCTAGCGAGG | 331 | TTCCTCCTTCCn | 332 | ACCTAGCGAGA |
| | CTTC | 438 | | | CCTTCCCTCGC | | GAAGGAGGAAG | | CTCGCTAGGT | | GGAAGGAGGAA |
| | C | | | | TAGGT | | GAGGAA | | | | |
| MRP1 | insTG | 55156/ | AC003026 | 333 | GGGGCTGGGG | 334 | CACGCACCCGA | 335 | GGGGCTGGGG | 336 | CACGCACCCGn |
| | GGG | 55157 | | | CTGGGGCTGGG | | CCCCGACCCAG | | CnTGGGTGCGT | | ACCCAGCCCC |
| | C | | | | TGCGTG | | CCCC | | G | | |
| MDR1 | T > C | 140837 | AC002457 | 337 | GCTCATTCGAG | 338 | AGAGCCGCTGC | 339 | CTCATTCGAGY | 340 | AGAGCCGCTRC |
| | | | | | CAGCGGCTCT | | TCGAATGAG | | AGCGGCTCTT | | TCGAATGAG |
| MDR1 | G > A | 84701 | AC005068 | 341 | AAAATTGCTATC | 342 | AGATAGTGATA | 343 | AAAATTGCTRTC | 344 | AGATAGTGAYA |
| | | | | | ACTATCT | | GCAATTTT | | ACTATCT | | GCAATTTT |
| MDR1 | G > A | 101 | M29432 | 345 | TTCACTTCAATT | 346 | ATGGGTAATTG | 347 | TCACTTCARTTA | 348 | GATGGGTAAYT |
| | | | | | ACCCATC | | AAGTGAA | | CCCATC | | GAAGTGAA |
| MDR1 | C > T | 308 | M29432 | 349 | CTTGAAGGGTC | 350 | TCAGGTTCAGA | 351 | TCTTGAAGGGY | 352 | TCAGGTTCAGR |
| | | | | | TGAACCTGA | | CCCTTCAAGA | | CTGAACCTG | | CCCTTCAAGA |
| MDR1 | C > T | 83946 | AC005068 | 353 | TCAGCAGTTAC | 354 | TGCAATGTAACT | 355 | CAGCAGTYACA | 356 | TGCAATGTRACT |
| | | | | | ATTGCA | | GCTGA | | TTGCAC | | GCTGA |
| MDR1 | G > A | 83973 | AC005068 | 357 | GACCCATGCAA | 358 | GGTCTAGCTTG | 359 | GACCCATGCRA | 360 | GGTCTAGCTYG |
| | | | | | GCTAGACC | | CATGGGTC | | GCTAGACC | | CATGGGTC |
| MDR1 | A > G | 84032 | AC005068 | 361 | GAGCACAACGG | 362 | CAGCTGGACCG | 363 | GAGCACAACRG | 364 | CAGCTGGACYG |
| | | | | | TCCAGCTG | | TTGTGCTC | | TCCAGCTG | | TTGTGCTC |
| MDR1 | G > A | 84074 | AC005068 | 365 | TGGGCAGACAG | 366 | CAGGGCCACTG | 367 | TGGGCAGACRG | 368 | CAGGGCCACYG |
| | | | | | TGGCCCTG | | TCTGCCCA | | TGGCCCTG | | TCTGCCCA |
| MDR1 | G > A | 84119 | AC005068 | 369 | CTCGTCCTGAT | 370 | CAAGATCTATCA | 371 | CTCGTCCTGRT | 372 | CAAGATCTAYCA |
| | | | | | AGATCTTG | | GGACGAG | | AGATCTTG | | GGACGAG |
| MDR1 | A > G | 77811 | AC005068 | 373 | GGCTTGAAGGT | 374 | ATTCTTACACCT | 375 | GGCTTGAAGRT | 376 | ATTCTTACAYCT |
| | | | | | GTAAGAAT | | TCAAGCC | | GTAAGAAT | | TCAAGCC |
| MDR1 | T > A | 78170 | AC005068 | 377 | TATTCCTTTACA | 378 | CAAAAATTTGTA | 379 | TATTCCTTTACW | 380 | ACAAAAATTWG |
| | | | | | AATTTTTG | | AAGGAATA | | AATTTTTG | | TAAAGGAAT |
| MDR1 | A > G | 73252 | AC005068 | 381 | ACTTTGTCTGAT | 382 | GCAGGAGATCA | 383 | ACTTTGTCTRAT | 384 | GCAGGAGATYA |
| | | | | | CTCCTGC | | GACAAAGT | | CTCCTGC | | GACAAAGT |
| MDR1 | G > A | 141529 | A0002457 | 385 | CTTCAGGTCGG | 386 | CAAGATCCATTC | 387 | CTTCAGGTCGG | 388 | CAAGATCCATY |
| | | | | | AATGGATCTTG | | CGACCTGA | | RATGGATCTTG | | CCGACCTGAAG |
| MDR1 | A > G | 141590 | AC002457 | 389 | AAACTGAACGA | 390 | TACCTTTTATCG | 391 | AAACTGAACRAT | 392 | TACCTTTTATYG |
| | | | | | TAAAAGGTA | | TTCAGTTTAA | | AAAAGGTA | | TTCAGTTTAA |
| MDR1 | C > T | 70200 | AC005068 | 393 | TTCTCCTTATGG | 394 | CTAACACCCAT | 395 | TTCTCCTTAYGG | 396 | CTAACACCCRT |
| | | | | | GTGTTAG | | AAGGAGAA | | GTGTTAG | | AAGGAGAA |
| MDR1 | C > A | 70204 | AC005068 | 397 | AATTTCTCATT | 398 | CACCCGTAATG | 399 | AATTTTCTCMTT | 400 | CACCCGTAAKG |
| | | | | | ACGGGTG | | AGAAAATT | | ACGGGTG | | AGAAAATT |
| MDR1 | C > T | 70237 | AC005068 | 401 | TTAATTGGCTAT | 402 | GTCCAAAATAG | 403 | TTAATTGGCYAT | 404 | GTCCAAAATRG |
| | | | | | TTTGGAC | | CCAATTAA | | TTTGGAC | | CCAATTAA |
| MDR1 | G > A | 70253 | AC005068 | 405 | TCTACTGGTATT | 406 | TAAGACAAATAC | 407 | TCTACTGGTRTT | 408 | TAAGACAAAYAC |
| | | | | | TGTCTTA | | CAGTAGA | | TGTCTTA | | CAGTAGA |
| MDR1 | C > A | 70371 | AC005068 | 409 | AATCATTTTATG | 410 | TGTGGCACATA | 411 | AATCATTTTMTG | 412 | TGTGGCACAKA |
| | | | | | TGCCACA | | AAATGATT | | TGCCACA | | AAATGATT |
| MDR1 | C > T | 137 | M29445 | 413 | GAACATTGCTTA | 414 | GTCTCCATAAG | 415 | GAACATTGCYTA | 416 | GTCTCCATARG |
| | | | | | TGGAGAC | | CAATGTTC | | TGGAGAC | | CAATGTTC |
| MDR1 | C > T | 176 | M29445 | 417 | GAAGAGATTGT | 418 | CCCTCACAATC | 419 | GAAGAGATYGT | 420 | CCCTCACRATC |
| | | | | | GAGGG | | TCTTC | | GAGGGC | | TCTTC |
| MDR1 | A > C | 43263 | AC005068 | 421 | TGAATGTTCCGT | 422 | CGGAGCCACGG | 423 | TGAATGTTCMG | 424 | CGGAGCCACKG |
| | | | | | GGCTCCG | | AACATTCA | | TGGCTCCG | | AACATTCA |
| MDR1 | T > A | 43162 | AC005068 | 425 | CGGGTGGTGAC | 426 | CTTCCTGTGTCA | 427 | CGGGTGGTGW | 428 | CTTCCTGTGWC |
| | | | | | ACAGGAAG | | CCACCCG | | CACAGGAAG | | ACCACCCG |
| MDR1 | C > T | 145984 | AC002457 | 429 | AAAATACTTTGG | 430 | CAAATTTCCAAA | 431 | AAAATACTTYGG | 432 | CAAATTTCCRAA |
| | | | | | AAATTTG | | GTATTTT | | AAATTTG | | GTATTTT |
| MDR1 | T > C | 171404 | AC002457 | 433 | ATCATTAAACGA | 434 | ACTCATTTCGTT | 435 | ATCATTAAAYGA | 436 | ACTCATTTCRTT |
| | | | | | AATGAGT | | TAATGAT | | AATGAGT | | TAATGAT |
| MDR1 | G > C | 171456 | AC002457 | 437 | GACTAAAGACA | 438 | CATTTTATGTGTC | 439 | GACTAAAGASA | 440 | CATTTATGTSTC |
| | | | | | CATAAATG | | TTTAGTC | | CATAAATG | | TTTAGTC |
| MDR1 | G > T | 171466 | AC002457 | 441 | GACATAAATGTT | 442 | AAACAAACATAA | 443 | AGACATAAATG | 444 | AAACAAACATA |
| | | | | | ATGTTTGTTT | | CATTTATGTCT | | KTATGTTTGT | | MCATTTATGTC |
| MDR1 | T > C | 171511 | AC002457 | 445 | GATACAGGGCT | 446 | TCATGAAGAGC | 447 | GATACAGGGYT | 448 | TCATGAAGARC |
| | | | | | CTTCATGA | | CCTGTATC | | CTTCATGA | | CCTGTATC |
| MDR1 | T > C | 171512 | AC002457 | 449 | GATACAGGGTC | 450 | ATTCATGAAGG | 451 | GATACAGGGTY | 452 | ATTCATGAAGRA |
| | | | | | CTTCATGAAT | | ACCCTGTATC | | CTTCATGAAT | | CCCTGTATC |
| MDR1 | G > A | 174901 | AC002457 | 453 | GTGCACGATAT | 454 | GCTCCCCAATA | 455 | GTGCACGATRT | 456 | GCTCCCCAAYA |
| | | | | | TGGGGAGC | | TCGTGCAC | | TGGGGAGC | | TCGTGCAC |
| MDR1 | C > T | 175068 | AC002457 | 457 | TAAGCAGCAAT | 458 | ACAGGACATTAT | 459 | TAAGCAGCAAY | 460 | ACACGACATTRT |
| | | | | | AATGTCGTGT | | TGCTGCTTA | | AATGTCGTGT | | TGCTGCTTA |
| MDR1 | C > T | 175074 | AC002457 | 461 | CAACAATGTTGT | 462 | GATGCACACAA | 463 | CAACAATGTYGT | 464 | GATGCACACRA |
| | | | | | GTGCATC | | CATTGTTG | | GTGCATC | | CATTGTTG |
| MDR1 | A > G | 175142 | AC002457 | 465 | CATTAAATGGA | 466 | CCCAGTCCTCC | 467 | CATTAAATGRAG | 468 | CCCAGTCCTYC |
| | | | | | GGACTGGG | | ATTTAATG | | GACTGGG | | ATTTAATG |
| MDR1 | A > G | 175180 | AC002457 | 469 | TCCTCTGAGGA | 470 | ACTGCACATCC | 471 | TCCTCTGAGRA | 472 | ACTGCACATYCT |
| | | | | | TGTGCAGT | | TCAGAGGA | | TGTGCAGT | | CAGAGGA |
| MDR1 | A > G | 139015 | AC002457 | 473 | AACTTACTTGTA | 474 | TCAAAGATACAA | 475 | AACTTACTTRTA | 476 | TCAAAGATAYAA |
| | | | | | TCTTTGA | | GTAAGTT | | TCTTTGA | | GTAAGTT |
| MDR1 | A > T | 139064 | AC002457 | 477 | AGAAATAGTTTA | 478 | TGTTGATTAAAC | 479 | AGAAATAGTWT | 480 | TGTTGATTAWA |
| | | | | | ATCAACA | | TATTTCT | | AATCAACA | | CTATTTCT |
| MDR1 | T > C | 139119 | AC002457 | 481 | TAGGGAGGGCT | 482 | TGGCCTTAAGC | 483 | TAGGGAGGGYT | 484 | TGGCCTTAARC |
| | | | | | TAAGGCCA | | CCTCCCTA | | TAAGGCCA | | CCTCCCTA |
| MDR1 | G > A | 139177 | AC002457 | 485 | GAAAGGTGAAA | 486 | TTGCTTTATTTC | 487 | GAAAGGTGARA | 488 | TTGCTTTATYTC |
| | | | | | TAAAGCAA | | ACCTTTC | | TAAAGCAA | | ACCTTTC |
| MDR1 | C > T | 139276 | AC002457 | 489 | CATTTACCCTAG | 490 | GGTCCATCTAG | 491 | CATTTACCCYAG | 492 | GGTCCATCTRG |
| | | | | | ATGGACC | | GGTAAATG | | ATGGACC | | GGTAAATG |
| MDR1 | G > A | 140118 | AC002457 | 493 | ATATGGAAGAA | 494 | TTGTAATTTTCT | 495 | ATATGGAAGRA | 496 | TTGTAATTTYCT |
| | | | | | AATTACAA | | TCCATAT | | AATTACAA | | TCCATAT |
| MDR1 | A > G | 140216 | AC002457 | 497 | AACACGGGCGT | 498 | TCAGATCAACG | 499 | AACACGGGCRT | 500 | TCAGATCAAYG |
| | | | | | TGATCTGA | | CCCGTGTT | | TGATCTGA | | CCCGTGTT |
| MDR1 | T > C | 140490 | A0002457 | 501 | TGTATTAAACGC | 502 | GGGATTCGCGT | 503 | TGTATTAAAYGC | 504 | GGGATTCGCRT |
| | | | | | GAATCCC | | TTAATACA | | GAATCCC | | TTAATACA |
| MDR1 | G > A | 140568 | AC002457 | 505 | TTGAAAGACAT | 506 | ATGTAGACATGT | 507 | TTGAAAGACRT | 508 | ATGTAGACAYG |
| | | | | | GTCTACAT | | CTTTCAA | | GTCTACAT | | TCTTTCAA |
| MDR1 | A > T | 140576 | AC002457 | 509 | CGTGTCTACTTA | 510 | TTCAACTTAAGT | 511 | CGTGTCTACWT | 512 | TTCAACTTAWG |
| | | | | | AGTTGAA | | AGACACG | | AAGTTGAA | | TAGACACG |
| MDR1 | A > G | 140595 | AC002457 | 513 | ATGTCCCCAGT | 514 | GCTGAATCACT | 515 | ATGTCCCCART | 516 | GCTGAATCAYT |
| | | | | | GATTCAGC | | GGGGACAT | | GATTCAGC | | GGGGACAT |
| MDR1 | G > A | 140727 | AC002457 | 517 | CCGGGCCGGAA | 518 | ATGACTGCTTC | 519 | CCGGGCCGGRA | 520 | ATGACTGCTYC |
| | | | | | GCAGTCAT | | CGGCCCGG | | GCAGTCAT | | CGGCCCGG |
| MDR1 | G > A | 139479 | AC002457 | 521 | GAGGCGGGCA | 522 | CTCGTGATCTG | 523 | GAGGCGGGCR | 524 | CTCGTGATCYG |
| | | | | | GATCACGAG | | CCCGCCTC | | GATCACGAG | | CCCGCCTC |
| MDR1 | T > C | 139619 | AC002457 | 525 | GGAGAATGGCG | 526 | CGGGTTCACGC | 527 | GGAGAATGGYG | 528 | CGGGTTCACRC |
| | | | | | TGAACCCG | | CATTCTCC | | TGAACCCG | | CATTCTCC |
| MDR1 | G > T | 65241 | AC005068 | 636 | ACTAGAAGGTT | 637 | ACCTTCCCAGA | 638 | ACTAGAAGGTK | 639 | ACCTTCCCAGM |
| | | | | | CTGGGAAGGT | | ACCTTCTAGT | | CTGGGAAGGT | | ACCTTCTAGT |
| MDR1 | G > A | 50537 | AC005068 | 640 | TCCTGACTATAC | 641 | TTGGCTTTGGTA | 642 | TCCTGACTATRC | 643 | TTGGCTTTGGY |
| | | | | | CAAAGCCAA | | TAGTCAGGA | | CAAAGCCAA | | ATAGTCAGGA |
| TOP1 | 1334 | 133418 | GI:11225259 | 529 | ACTTTTCCGTTG | 530 | TTGCCGCGGCA | 531 | ACTTTTCCGTKG | 532 | TTGCCGCGGCM |
| | G > T | 45 | | | CCGCGGCAACT | | ACGGAAAAGTTC | | CCGCGGCAACT | | ACGGAAAAGTTC |
| TOP1 | 1845 | 1845 | GI:11225259 | 533 | CTCGGGAAGGG | 534 | TCTGATGGAGC | 535 | CTCGGGAAGGR | 536 | TCTGATGGAGY |
| | A > G | | | | CTCCATCAGA | | CCTTCCCGAG | | CTCCATCAGA | | CCTTCCCGAG |

[0162] TABLE 2
The nucleic acid and amino acid sequences referred to in this application

| | | Protein Acc | SEQ | | SEQ | |
|---|---|---|---|---|---|---|
| Gene | AS change | No | ID NO | Protein | ID N= | Protein wt > mut |
| UGT1A1 | L15R | G8850236 | 538 | PLVLGRLLCVL | 539 | PLVLGXLLCVL |
| UGT1A1 | G71R | G8850236 | 540 | LYIRDRAFYTL | 541 | LYIRDXAFYTL |
| UGT1A1 | D119Dframeshift | G8850236 | 542 | KKIKKDCYAFC | 543 | KKIKKDX |
| UGT1A1 | P152Pframeshift | G8850236 | 544 | VMLTDPFPSLQ | 545 | VMLTDPX |
| UGT1A1 | F170del | G8850236 | 546 | LSLPTVFLHAL | 547 | LSLPTVFX |
| UGT1A1 | L175Q | G8850236 | 548 | FFLHAQPCSLE | 549 | FFLHAXPCSLE |
| UGT1A1 | C177R | G8850236 | 550 | LHALPRSLEFE | 551 | LHALPXSLEFE |
| UGT1A1 | R209W | G8850236 | 552 | MTFLQWVKNML | 553 | MTFLQXVKNML |
| UGT1A1 | P229Q | G8850236 | 554 | DVVYSQYATLA | 555 | DVVYSXYATLA |
| UGT1A1 | G276R | G8850236 | 556 | NMVFVRGINCL | 557 | NMVFVXGINCL |
| UGT1A1 | A292V | G8850236 | 558 | SQEFEVYINAS | 559 | SQEFEXYINAS |
| UGT1A1 | Y293Wframeshift | G8850236 | 560 | QEFEAWRTWN | 561 | QEFEAXINASG |
| UGT1A1 | G308E | G8850236 | 562 | VVFSLESMVSE | 563 | VVFSLXSMVSE |
| UGT1A1 | Q331R | G8850236 | 564 | LGKIPRTVLWR | 565 | LGKIPXTVLWR |
| UGT1A1 | Q357R | G8850236 | 566 | VKWLPRNDLLG | 567 | VKWLPXNDLLG |
| UGT1A1 | R367G | G8850236 | 568 | GHPMTGAFITH | 569 | GHPMTXAFITH |
| UGT1A1 | A368T | G8850236 | 570 | HPMTRTFITHA | 571 | HPMTRXFITHA |
| UGT1A1 | P387R | G8850236 | 572 | ICNGVRMVMMP | 573 | ICNGVXMVMMP |
| UGT1A1 | S375F | G8850236 | 574 | ITHAGFHGVYE | 575 | ITHAGXHGVYE |
| UGT1A1 | S381R | G8850236 | 576 | HGVYERICNGV | 577 | HGVYEXICNGV |
| UGT1A1 | A401P | G8850236 | 578 | DQMDNPKRMET | 579 | DQMDNXKRMET |
| UGT1A1 | R403Rframeshift | G8850236 | 580 | MDNAKRHGD. | 581 | MDNAKX |
| UGT1A1 | K428E | G8850236 | 582 | LENALEAVIND | 583 | LENALXAVIND |
| UGT1A1 | Y486D | G8850236 | 584 | LTWYQDHSLDV | 585 | LTWYQXHSLDV |
| UGT1A1 | S488F | G8850236 | 586 | WYQYHFLDVIG | 587 | WYQYHXLDVIG |
| UGT1A1 | Q49stop | G8850236 | 588 | LGAIQ. | 589 | LGAIQ. |
| UGT1A1 | C280stop | G8850236 | 590 | VGGIN. | 591 | VGGIN. |
| UGT1A1 | Q331stop | G8850236 | 592 | LGKIP. | 593 | LGKIP. |
| UGT1A1 | W335stop | G8850236 | 594 | PQTVL. | 595 | PQTVL. |
| UGT1A1 | Q357stop | G8850236 | 596 | VKWLP. | 597 | VKWLP. |
| UGT1A1 | K437stop | G8850236 | 598 | NDKSY. | 599 | NDKSY. |
| MRP1 | F329C | G2828206 | 600 | YFLMSCFFKAI | 601 | YFLMSXFFKAI |
| MRP1 | R433S | G2828206 | 602 | SVDAQSFMDLA | 603 | SVDAQXFMDLA |
| MRP1 | R723Q | G2828206 | 604 | QNDSLQENILF | 605 | QNDSLXENILF |
| MDR1 | N21D | G2506118 | 606 | FFKLNDKSEKD | 607 | FFKLNXKSEKD |
| MDR1 | F103L | G2506118 | 608 | INDTGLFMNLE | 609 | INDTGXFMNLE |
| MDR1 | V168I | G2506118 | 610 | FDVHDIGELNT | 611 | FDVHDXGELNT |
| MDR1 | S400N | G2506118 | 612 | RNVHFNYPSRK | 613 | RNVHFXYPSRK |
| MDR1 | G412G | G2506118 | 614 | VKILKGLNLKV | 615 | VKILKXLNLKV |
| MDR1 | T436T | G2506118 | 616 | CGKSTTVQLMQ | 617 | CGKSTXVQLMQ |
| MDR1 | A893S | G2506118 | 618 | KELEGSGKIAT | 619 | KELEGXGKIAT |
| MDR1 | A999T | G2506118 | 620 | FAPDYTKAKIS | 621 | FAPDYXKAKIS |
| MDR1 | A1001T | G2506118 | 622 | PDYAKTKISAA | 623 | PDYAKXKISAA |
| MDR1 | Q1107P | G2506118 | 624 | KRLNVPWLRAH | 625 | KRLNVXWLRAH |
| MDR1 | A1132A | G2506118 | 626 | IAENIAYGDNS | 627 | IAENIXYGDNS |
| MDR1 | S1141T | G2506118 | 628 | NSRVVTQEEIV | 629 | NSRVVXQEEIV |
| MDR1 | I1145I | G2506118 | 630 | VSQEEIVRAAK | 631 | VSQEEXVRAAK |
| TOP1 | G363C | G12644118 | 632 | PGLFRCRGNHP | 633 | PGLFRXRGNHP |
| TOP1 | D533G | G12644118 | 634 | DFLGKGSIRYY | 635 | DFLGKXSIRYY |

### THE FIGURES SHOW

[0163] FIG. 1 shows the correlation of the exon 26 SNP with intestinal MDR1 expression in 21 volunteers determined by Western Blot analyses. The box plot shows the distribution of MDR1 expression clustered according to the MDR1 3435>T genotype at position corresponding to position 176 of the MDR1 gene (GenBank Acc. No. M29445). The T allele was associated with a lower expression of p-glycoprotein.

[0164] FIG. 2 shows the correlation of MDR1 3435C>T genotype and digoxin uptake in 14 healthy volunteers who participated in a clinical study that addresses peak plasma levels of digoxin at steady state [Johne et al., 1999, Clin. Pharmacol. Ther. 66:338-345]. Maximum digoxin levels were statistically significantly different (p=0.006, Mann Whitney U test) between the two groups which were homozygous for the T and C allele, respectively.

[0165] FIG. 3 represents the correlation of the genotype (wt/wt: 1; wt/mut and mut/mut:2) with MRP1 mRNA content in duodenal biopsies from healthy volunteers derived from two independent experiments, before and after application of rifampicin. Treatment with rifampicin had no effect on MRP1 mRNA expression (p<0.001, paired t-test). A strong trend of an association of MRP1 genotype with MRP1 mRNA levels was detected (p=0.086, Kruskal-Wallis test).

[0166] FIGS. 4 to 28 show the nucleic acid and amino acid sequences referred to herein.

[0167] FIG. 29 shows the expression profile of genes relevant to Irinotecan metabolism in carcinoma cell lines. This semiquantitativ RT-PCR shows amounts of transcripts for the genes indicated right to the amplicons. PCR products were analyzed by agarose electrophoresis, stained with ethidium bromid. The respective fragment sizes are indicated on the left in basepaires (bp).

[0168] FIG. 30 shows growth inhibition curves for CPT-11 (A) and SN-38 (B) with epithelial carcinoma cell lines LS174T (colon), KB 3-1 (cervix) and RT112 (bladder). Concentrations of CPT-11 ranged from 0 to 200 μg/ml and of SN-38 from 0 to 200 ng/ml. Cells were treated for three days. The data for each concentration are mean values of at least three wells.

[0169] FIG. 31 growth inhibition curves for CPT-11 (A) and SN-38 (B) with a epithelial cervix carcinoma cell line KB 3-1 and two subclones expressing high amounts of MDR1, KB 3-1 (MDR1) and KB 3-1 (MDR1, CYP3A5). Concentrations of CPT-11 ranged from 0 to 200 μg/ml and of SN-38 from 0 to 200 ng/ml. Cells were treated for three days. The data for each concentration are mean values and standard deviation of at least three wells.

[0170] FIG. 32 shows growth inhibition curves for CPT-11 (A) and SN-38 (B) with the bladdercancer cell line RT112 and and its subclones RT112 (MDR1, UGT1A1) expressing MDR1 and higher amounts of UGT1A1. Concentrations of CPT-11 ranged from 0 to 200 μg/ml and of SN-38 from 0 to 200 ng/ml. Cells were treated for three days. The data for each concentration are mean values and standard deviation of at least three wells.

[0171] FIG. 33 shows growth inhibition curves for CPT-11 (A) and SN-38 (B) with inhibition of MDR1 by R-Verapamil. The epithelial cervix carcinoma cell line KB 3-1 and the two subclones KB 3-1 (MDR1) and KB 3-1 (MDR1, CYP3A5), with high MDR1 expression, were tested for the influence of MDR1 inhibition by R-Verapamil on drug sensitivity. Concentrations of CPT-11 ranged from 0 to 200 μg/ml and of SN-38 from 0 to 200 ng/ml and R-Verapamil was added to 10 μg/ml final concentration(+V). Cells were treated for three days. The data for each concentration are mean values of two wells.

[0172] FIG. 34 shows growth inhibition curves for CPT-11 (A) and SN-38 (B) with inhibition of MDR1 by R-Verapamil. To circumvent the MDR1 effect on drug resistance cells were treated in parallel with R-Verapamil. The KB 3-1 (MDR1) and KB 3-1 (MDR1, CYP3A5), which differ in their CYP3A5 expression, were tested for remaining resistance after inhibition of MDR1. Concentrations of CPT-11 ranged from 0 to 200 μg/ml and of SN-38 from 0 to 200 ng/ml and R-Verapamil was added to 10 μg/ml final concentration(+V). Cells were treated for three days. The data for each concentration are mean values of two wells.

[0173] The present invention is illustrated by reference to the following biological Examples which are merely illustrative and are not to be constructed as a limitation of the scope of the present invention.

### EXAMPLE 1

### Phenotypically Impact of the C to T Substitution at Position Corresponding to Position 176 of the MDR1 Gene (Acc. No. M29445)

[0174] To investigate the influence of the single nucleotide C to T substitution at position corresponding to position 176 of the MDR1 gene (Acc. No. M29445) also referred to as MDR1 exon 26 SNP C3435T on intestinal P-glycoprotein (PGP) expression, samples from biopsies and duodenal enterocyte preparations from 21 were investigated at the Dr. Margarete Fischer-Bosch-Institute for Clinical Pharmacology in Stuttgart by quantitative immunohistochemistry and Western blots. The results are shown in FIG. 1. Homozygous carriers of the T allele (having at a position corresponding to position 176 of the MDR1 gene (Accession No: M29445) a T) demonstrated significantly higher PGP levels compared to homozygous carriers of the C allele (having at a position corresponding to position 176 of the MDR1 gene (Accession No: M29445) a C). Individuals with heterozygous genotype showed an intermediate level of PGP expression.

[0175] Furthermore, the influence of the MDR1 genotype on intestinal uptake-related pharmacokinetics of digoxin was investigated in a clinical study at the University Medical Center, Charite in Berlin. Maximal digoxin blood levels (Cmax) at steady state were correlated with the MDR1 3435C>T genotype 14 healthy volunteers after oral application of digoxin. FIG. 2 shows, volunteers homozygous for the T allele show statistically significantly lower digoxin levels than volunteers with a C/C genotype. (p=0.006, Mann Whitney U test) and reflects the impact of this polymorphism on digoxin pharmacokinetics.

### EXAMPLE 2

### Correlation of MRP1 Polymorphisms with MRP1 Expression and Side Effects During Therapy with MRP1 Substrates

[0176] Functional polymorphisms in the MRP1 gene affect the transport activity which in consequence modulates plasma levels and/or intracellular concentrations of MRP1 substrate drugs. Increased levels of such drugs can lead to side effects whereas decreased levels may result in subtherapeutical drug levels and therapy failure. MRP1 polymorphisms were correlated with the occurence of drug-related adverse effects and therapeutic efficacy in patients treated with MRP1 substrate drugs. In a case-control study, the frequency distribution of MRP1 SNPs was compared between a group of patients who suffered from cisplatin-related nephrotoxicity and a group of patients with nephro- and hepatotoxicities caused from anti-cancer drugs with a group of healthy controls. Furthermore, samples of known MRP1 mRNA levels were screened for MRP1 genotype. The results in the group of patients demonstrating nephro- and hepatotoxicity during anti-cancer treatment, are listed in the following table for one MRP1 SNP:

| | | Allele | | Genotype frequency [%] | | |
|---|---|---|---|---|---|---|
| | | frequency [%] | | | | *A/A |
| SNP | group | G allele | A allele | *G/A | *A/A | expected² |
| 150727G > A¹ | Controls | 66.7 | 33.3 | 50 | 8.3 | 10.9 |
| | Cases | 50.0 | 50.0 | 14.3 | 42.9 | 25.0 |

¹according to Acc. No. AC025277
²calculated according to Hardy-Weinberg

[0177] In contrast to control samples, the A allele (substitution of G to A at position according to position 150727 of the MRP1 gene, Acc. No. AC025277) was statistically significantly overrepresented in patients suffering from drug-related kidney- and liver side effects compared to healthy controls (p=0.044, Chi² test) and was thus predictive for these side effects.

[0178] Furthermore, an association of MRP1 genotype with mRNA expression before and after rifampicin application was detected for two MRP1 SNP's, 95T>C (SEQ ID NOs. 209, 210, 211, and 212, nucleotide substitution of T to C at a position corresponding to position 95 of the MRP1 gene, Acc. No. AF022831) and 259A>G (SEQ ID NOs. 277, 278, 279, and 280, nucleotide substitution of A to G at a position corresponding to position 259 of the MRP1 gene, Acc. No. AF022831). These SNPs are linked and form one allele. The mutant allele (MRP1mut, C at position 95 and G at position 259 of the MRP1 gene, Acc. No. AF022831) is statistically significantly correlated with decreased MRP1 mRNA expression and the wildtype allele (MRP1wt, T at position 95 and A at position 259 of the MRP1 gene, Acc. No. AF022831) with increased MRP1 expression in two independent experiments (with and without rifampicin induction), as illustrated in FIG. 3.

[0179] The differences in the MRP1 mRNA content are based on MRP1 genotype-related interindividual differences and the analysis of these SNP's is of high diagnostic and prognostic value for MRP1 expression levels and to predict the therapeutic outcome and adverse effects of MRP1 substrate drugs.

### EXAMPLE 3

### Dosage Calculation

[0180] Therapeutic efficacy ans adverse effects of irinotecan depend on plasma levels and intracellular concentrations of the parent compound and the active metabolites (e.g. SN-38), processes which are controlled by CYP3A5- and UGT1A1-related metabolism and MRP1- and MDR1-related transport processes [Atsumi, et al., 1991, Xenobiotica 21:1159-69, lyer, et al., 1998, J Clin Invest 101:847-54, Ciotti, et al., 1999, Biochem Biophys Res Commun 260:199-202, Santos, et al., 2000, Clin Cancer Res 6:2012-20, Kuhn, 1998, Oncology (Huntingt) 12:3942, Chen, et al., 1999, Mol Pharmacol 55:921-8, Chu, et al., 1997, Cancer Res 57:1934-8, Chu, et al., 1997, J Pharmacol Exp Ther 281:304-14; Chu, et al., 1998, Cancer Res 58:5137-43, Chu, et al., 1999, Drug Metab Dispos 27:440-1, Chu, et al., 1999, J Pharmacol Exp Ther 288:735-41, Mattern, et al., 1993, Oncol Res 5:467-74, Hoki, et al., 1997, Cancer Chemother Pharmacol 40:433-8, Sugiyama, et al., 1998, Cancer Chemother Pharmacol 42:S44-9]. For example, MRP1 works in close connection with glucuronosyltransferases as part of the cellular detoxification system and is known to transport glucuronosyl conjugates such as SN-38G [König et al., 1999, Biochim Biophys Acta 1461:377-394, Kerb et al., 2001, Pharmacogenomics 2:51-64]. For example, the extend to which SN-38G is exported from the cell into bile greatly influences the rate of its formation. For an efficient detoxification of SN-38 both processes are necessary, conjugation by UGT1A1 and export of the glucuronide.

[0181] The 47518T>C (SEQ ID NOs.137, 138, 139, and 140) and 9736A>G (SEQ ID NOs. 149, 150, 151, 152) nucleotide substitutions of the CYP3A5 gene (Acc. No. GI:10281451), and the 145601T>G (SEQ ID NOs. 141, 142, 143, 144) and 145929A>G (SEQ ID NOs. 145, 146, 147, and 148) nucleotide substitutions of the CYP3A5 gene (Acc. No. GI:11177452) form an high CYP3A5 expression-related allele and are therefore associated with a higher metabolic inactivation of irinotecan. Individuals with this allele are extensive metabolizers (EMs) and are therefore in contrast the reminder poor metabolizers (PMs) less likely to suffer from irinotecan toxicity. Those with one high expressor and one low expressor-related allele are regarded as intermediate metabolizers (IMs).

[0182] The 176C>T nucleotide substitution (SEQ ID NOs. 217, 218, 219, and 220) of the MDR1 gene (Accession No: M29445) is associated with low PGP expression-related low drug efflux, and the 95T>C (SEQ ID NOs. 209, 210, 211, and 212) and the 259A>G (SEQ ID NOs. 277, 278, 279, and 280) nucleotide substitutions of the MRP1 gene (Acc. No. AF022831) are associated with low mRNA expression and the 150727G>A nucleotide substitution (SEQ ID NOs. 217, 218, 219, and 220) of the MRP1 gene (Accession No: M29445) is associated with low PGP expression-related low drug efflux and the 150727G>A nucleotide substitution (SEQ ID NOs. 217, 218, 219, and 220) of the MRP1 gene (Accession No: AC025277) is associated with adverse effects. Individuals carrying low transporter expression-related alleles are therefore less capable to clear cells from toxic compounds. Both, transport and metabolism are affected in a gene-dose dependant manner. According to the number of low expression-related alleles of the respective transport protein, individuals can be classified as having either extensive (ET), intermediate (IT) or poor transporter capacity (PT) of the respective gene.

[0183] By genetic testing prior to onset of treatment with irinotecan, the MDR1- and MRP1 -related transport capacity of the patients can be predicted. The individual risk to adverse effects depends on the number of PM and/or PT alleles Individuals with PM-related alleles of CYP3A5 and UGT1A1 and PT-related alleles of MDR1 and MRP1 are at the highest risk to suffer from irinotecan toxicity.

[0184] Based on this knowledge, the initial dose can be adjusted prior to the first dose as shown by Brockmöller et al. (2000, Pharmacogenomics 1:125) for substrate drugs of CYP2D6, CYP2C9, and CYP2C19.

[0185] Dose adjustment can be achieved using a scoring system. For each PM- or PT-related allele a certain score is assigned e.g. a score of 2 is assigned to UGT1A1 PM alleles 226A, (SEQ ID NOs 9, 10, 11, 12, 540, 541) and 701A (SEQ ID NOs. 25, 26, 27, 28, 554, 555), and a score of 1 is assigned to the CYP3A5 PM-related alleles (47523T plus 35649A plus 145601T plus 145929A, 47523T plus 35649G plus 145601G plus 145929G, and 47523C plus 35649A plus 145601T plus 145929A), to the MDR1 low expression allele 176T (SEQ ID NOs.: 417, 418, 419, and 420), to the MRP1 low expression alleles 150727A (SEQ ID NOs. 217, 218, 219, and 220) and 259G (SEQ ID NOs. 277, 278, 279, and 280), to the MRP1 150727A allele (SEQ ID NOs. 217, 218, 219, and 220). After genotyping the scores are summarized and irinotecan dosage is adjusted according to the sum. Each single score corresponds to a dose reduction of 10%, i.e. a score of one corresponds to a 10% dose reduction, a score of two to 20%, a score of 3 to 30%, etc.

### EXAMPLE 4

### Culture Conditions and Biological Assays

[0186] The human epithelial cervical cancer cell line KB 3-1 with two subclones (KB 3-1 (MDR1⁺⁺⁺) and KB 3-1 (MDR1⁺⁺⁺, CYP3A5)) and the bladder cancer cell line RT112, also with subclone (RT112 (MDR1⁺, UGT1A1)), were cultured in Dulbecco's Modified Eagle Medium (DMEM) including 3.7 g/l NaHCO₃, 4.5 g/l D-Glucose, 1.028 g/l N-Acetyl-L-Alanyl-L-glutamine and supplemented with 10% fetal bovine, 1 mM Na-pyruvate and 1% non-essential amino acids. The human colon cancer cell line LS174T was cultured in Dulbecco's modified Eagle medium containing L-glutamine, pyridoxine hydrochloride and 25 mM Hepes buffer without phenol red, supplemented with 10% fetal bovine, 1 mM Na-pyruvate and 1% non-essential amino acids. All cells were incubated at 37° C. with 5% CO₂ in a humidified atmosphere.

[0187] Drugs

[0188] Irinotecan (CPT-11) and its active metabolite SN-38 were provided by Pharmacia. For preparation of stock solutions the substances were dissolved in methanol, 10 mg/ml for CPT-11 and 1 mg/ml for SN-38 and stored at 4° C. protected from light. Lower concentrated dilutions were prepared in PBS and cell culture medium. R-Verapamil was applied from SIGMA, dissolved in DMSO to 50 mg/ml and further diluted in PBS.

[0189] Treatment of Cells with Drugs

[0190] Cells were seeded in 96-well culture plates 24 h prior to treatment. With respect to differential growth rates KB 3-1 and RT112 cells were seeded at 700 cells/well, RT112 (MDR1⁺, UGT1A1) at 1000 cells/well and KB 3-1 (MDR1⁺⁺⁺) and KB 3-1 (MDR1⁺⁺⁺, CYP3A5) at 1200 cells/well. LS174T were seeded at 1.0×10⁴ cells/well. Cells were treated with freshly prepared serial dilutions in culture medium, 0, 0.5, 1, 2.5, 5, 7.5, 10, 25, 50, 75, 100 and 200 μg/ml for CPT-11, and 0, 0.1, 0.25, 0.5, 1, 5, 10, 25, 50, 75, 100 and 200 ng/ml for SN-38. Four well were treated with the same drug dilution. Cells were incubated for 3 days at 37° C. in a humidified 5% CO₂ atmosphere.

[0191] For MDR1 inhibition experiments R-Verapamil was added to 10 μg/ml final concentration in two wells of each drug dilution.

[0192] Cytotoxicity Assay

[0193] A commercially available MTS assay system (Promega, Madison, USA) was used to determine growth inhibition and cell death according to the instructions of the manufacturer. Three days after adding the drugs, 20 μl of the combined MTS/PMS solution was added to each well of the 96-well culture plate. The plate was incubated for at least 45 min at 37° C. in a humidified 5% CO₂ atmosphere and the absorbance at 492 nm was measured. The absorbance values of untreated control cells on each plate were set as 100% growth and used to calculate the remaining growth of drug treated cells. Untreated cells on the culture plates served as controls for unaffected growth and survival.

[0194] The drug concentration effecting a 50% inhibition of cell growth was defined as the IC₅₀.

[0195] RNA Preparation and cDNA Synthesis

[0196] From each cell batch used in these experiments messenger RNA was isolated from cell lysates by oligo-dT magnet beads (μMACS mRNA Isolation Kit; Miltenyi Biotech) following the instructions of the manufacturer. 250 ng mRNA of each cell line was applied in a 20 μl cDNA synthesis reaction with Superscript II reverse transcriptase (Gibco BRL). Dilutions of this cDNAs served as template in transcript specific amplification reactions.

[0197] PCR Primers and Reaction Conditions

[0198] PCRs were set up in 25 μl reactions with 0.5 units Taq Polymerase (Qiagen), 200 μM nucleotide mix, 5 μl cDNA template dilution and 0.2 μM gene specific primers, as indicated in Table 3. All reactions were run under the same amplification conditions, differing only in number of cycles (table ), 2 min pre-denaturation at 94° C., than for amplification: 45 sec denaturation at 94° C., 45 sec annealing at 62° C. and 45 sec elongation at 72° C., except for UGT1A1 which needed longer elongation of 2 min.

TABLE 3

Sequences of gene specific primers and conditions
for PCR reactions. F: forward primer; R: reverse
primer for mRNA sequences.

| | |
|---|---|
| cDNA | cycle |

| | | | |
|---|---|---|---|
| Gene | Primer sequence (5′-3′) | dilution | number |

| | | | |
|---|---|---|---|
| MDR1 | F: TGCCTTCATCGAGTCACTGCC | 1:100 | 26 |
| | R: TCACTGGCGCTTTGTTCGAGC | | |
| MRP1 | F: TCTCCAAGGAGCTGGACACA | 1:10 | 30 |
| | R: CGTGGTGACCTGCAATGAGT | | |
| UGT1A | F: GATGATGCCCTTGTTTGGTG | 1:100 | 30 |
| | R: TGTTTCAAGTTTGGAAATGACTAGGG | | |
| UGT1A1 | F: AACCTCTGGCAGGAGCAAAGG | 1:10 | 34 |
| | R: TGTTTTCAAGTTTGGAAATGACTAGGG | | |
| CYP3A4 | F: TCAGCCTGGTGCTGCTCTATCTAT | 1:10 | 34 |
| | R: AAGCCCTTATGGTAGGACAAAATATTT | | |
| CYP3A5 | F: TTGTTGGGAAATGTTTTGTCCTATC | 1:10 | 34 |
| | R: ACAGGGAGTTGACCTTCATACGTT | | |
| PLA2 | F: GCTGGTTCAGAAGGCCAAAC | 1:100 | 26 |
| (house keeping | R: GGGCCAGACCCAGTCTGATA | | |
| gene) | | | |

### EXAMPLE 5

### Expression of Genes Involved in Irinotecan Metabolism

[0199] Messenger RNA was isolated from the human bladder cancer cell line RT112, its subclone RT112 (MDR1, UGT1A1), the human epithelial cervical cancer cell line KB 3-1 and two subclones KB 3-1 (MDR1⁺⁺⁺) and KB 3-1 (MDR1⁺⁺⁺, CYP3A5), and the colon carcinoma cell line LS174T (ATCC CL-188). These mRNAs were reverse transcribed into cDNA and applied as templates in transcript-specific amplification reactions to determine the expression levels of genes involved in irinotecan transport and metabolism (MDR1, MRP1, UGT1A, UGT1A1, CYP3A4, CYP3A5). Amplification of the house keeping gene phospholipase A2 (PLA2) was used as a control for comparable cDNA amounts in the reactions.

[0200] The amplification reactions in FIG. 29 show that the carcinoma cell lines RT112, KB 3-1, and LS174T have no or very low expression of MDR1, respectively. RT112 (MDR1, UGT1A1) is a subclone of RT112, which was selected for resistance to cytotoxic drugs as described in Seemann et al. (Urol Res 1995; 22:353-360), and is characterised by a moderately increased MDR1 expression. The drug resistant subclones KB 3-1 (MDR1⁺⁺⁺) and KB 3-1 (MDR1⁺⁺⁺, CYP3A5) were derived similarly from the original KB 3-1 cell line by exposure to MDR1 substrates. These subclones are characterized by highly increased MDR1 expression. They show >20-times more transcripts than the original KB 3-1 cells, implicating a very high MDR1 activity. MRP1 is expressed at the same level in all cell lines. Transcripts of UGT1A enzymes are present only in RT112, RT112 (MDR1, UGT1A1), and LS174T cells. UGT1A1 is only weakly expressed in RT112, stronger expressed in RT112 (MDR1, UGT1A1) and shows highest expression in LS174T cells. CYP3A4 was solely detected in very small amounts in LS174T. RT112 cells, RT112 (MDR1, UGT1A1), and LS174T show a heterozygous expression of the functionally inactive splice variant and the functionally active transcript of CYP3A5. In contrast, KB 3-1 and KB 3-1 (MDR1⁺⁺⁺) cells have only the active CYP3A5 transcript and the KB 3-1 (MDR1⁺⁺⁺, CYP3A5) showed the highest expression of the active CYP3A5 transcript, implicating that the latter have the highest CYP3A5 activity.

### EXAMPLE 6

### Colon and Other Epidermal Cancer Cell Lines with No or Low MDR1 and CYP3A5 Activity Are Sensitive to CPT-11 and SN-38

[0201] The colon cancer cell line LS174T, the cervical cancer cell line KB 3-1 and the bladder cancer cell line RT112 were seeded in 96-well culture plates 24 h prior to treatment. Four wells of each cell line were incubated with serial dilutions of CPT-11 and SN-38 and analysed as described above. FIG. 30 shows that all three epidermal cancer cell lines stop proliferation and die upon treatment with CPT-11 and SN-38. The concentrations resulting in 50% inhibition (IC₅₀) for CPT-11 are 1.5 μg/ml for LS174T, 2.5 μg/ml for RT112 and 5 μg/ml for KB 3-1 cells. The active metabolite of CPT-11, SN-38 shows a 1000-fold higher efficacy than CPT-11, since 10³-times lower concentrations cause the same degree of growth inhibition and cell death. The IC₅₀ of SN-38 is 5 ng/ml for LS174T cells, 4 ng/ml for RT112 cells and 25 ng/ml for KB 3-1 cells.

[0202] These results show that all three epidermal cancer cell lines although derived from different tissues are similarly sensitive to CPT-11 and SN-38 treatment. This also indicates that cancer cells expressing no or only low levels of MDR1 (FIG. 29) can be efficiently killed by CPT-11 and SN-38 (FIG. 30).

### EXAMPLE 7

### MDR1 Activity Correlates with Resistance of Cancer Cells Toward CPT-11 and SN-38

[0203] Cells of KB 3-1 and its strongly MDR1 expressing subclones KB 3-1 (MDR1⁺⁺⁺) and the KB 3-1 (MDR1⁺⁺⁺, CYP3A5) were seeded in 96-well culture 24 h prior to treatment. Four wells of each cell line were incubated with serial dilutions of CPT-11 and SN-38 and treated as described above. The inhibition curves (FIG. 31) of the MDR1 high expresser KB 3-1 subclones (KB 3-1 (MDR1⁺⁺⁺) and KB 3-1 (MDR1⁺⁺⁺, CYP3A5)) (FIG. 29) demonstrate a significant higher resistance to CPT-11 and SN-38 compared to the MDR1 low expresser KB 3-1 cell line (KB 3-1). The IC₅₀ for CPT-11 increases 17 to 40 told from 5 μg/ml in KB 3-1 to 85 μg/ml in KB 3-1 (MDR1⁺⁺⁺) and 200 μg/ml in KB 3-1 (MDR1⁺⁺⁺, CYP3A5) cells. The IC₅₀ for SN-38 increases at least 8 times from 25 ng/ml in KB 3-1 to 200 ng/ml in KB 3-1 (MDR1⁺⁺⁺) and >200 ng/ml in KB 3-1(MDR1⁺⁺⁺, CYP3A5).

[0204] CPT-11 and SN-38 are substrates of MDR1, and are therefore removed from the cells by MDR1 activity. The MDR1 expression level correlates inversely with the sensitivity of tumor cells towards CPT-11 and SN-38. Subsequently, the killing of cells with high MDR1 expresser phenotype requires much higher concentrations of CPT-11.

### EXAMPLE 8

### UGT1A1 Activity Correlates with Sensitivity Towards SN-38 and Not Towards CPT-11

[0205] CPT-11 and SN-38 sensitivity was compared between RT112 cells and its subclone RT112 (MDR1, UGT1A1). Four wells of each cell line were incubated with serial dilutions of CPT-11 and SN-38 and treated as described above.

[0206] The difference in sensitivity against CPT-11 is only small as shown in FIG. 32A. The IC₅₀ of RT112(MDR1, UGT1A1) cells of 4 μg/ml CPT-11 is two-times higher compared to RT112 cells (IC₅₀ of 2.5 μg/ml). In contrast to RT112 cells which express no MDR1, RT112 MDR1, UGT1A1) cells express an intermediate amount of MDR1 which can explain the small though significant increase of CPT-11 sensitivity. A much stronger difference exists between RT112 (IC₅₀ of 4 ng/ml) and RT112 (MDR1, UGT1A1) cells (IC₅₀ of 75 ng/ml) after treatment with SN-38 (FIG. 32B). This 19-fold higher resistance of the RT112 (MDR1, UGT1A1) cell line can be explained by the additional detoxifying effect of UGT1A1 which is expressed at a higher level in RT112 (MDR1, UGT1A1) than in RT112 cells (FIG. 29). In contrast to SN-38, CPT-11 is not metabolized by UGTs. Therefore, CPT-11-related toxicity is not affected by UGT1A1 expression and the resistance-enhancing capabilitiy of UGTs in RT112(MDR1, UGT1A1) cells is only detected by application of SN-38.

### EXAMPLE 9

### MDR1 Inhibition Serves as Sensitizer Towards CPT-11 and SN-38 in MDR1 High Expressing But Not Low Expressing Cancer Cells

[0207] The sensitivity of KB 3-1 cells and its subclones KB 3-1 (MDR1⁺⁺⁺) and KB 3-1 (MDR1⁺⁺⁺, CYP3A5) against CPT-11 and SN-38 was assessed after blocking MDR1 function using the specific inhibitor R-Verapamil. Four wells of each cell line were incubated with serial dilutions of CPT-11, SN-38 and analysed as described above. Two wells were additionally treated with the MDR1 inhibitor R-Verapamil. FIG. 33 shows that addition of R-Verapamil has only marginal effects on the CPT-11 and SN-38 sensitivity of MDR1 low expresser KB 3-1 cells (CPT-11 and SN-38 IC50s of 5 μg/ml and 25 ng/ml without R-Verapamil versus 4.5 μg/ml and 15 ng/m with R-Verapamil, respectively). In contrast, the sensitivity of the MDR1 expressing cells KB 3-1(MDR1⁺⁺⁺) and KB 3-1(MDR1⁺⁺⁺, CYP3A5) towards CPT-11 and SN-38 was 8-fold and 10-fold higher after inhibition of MDR1 transport function with R-Verapamil. The IC₅₀ of KB 3-1 (MDR1⁺⁺⁺) cells for CPT-11 decreased from 85 μg/ml without to 10 μg/ml with R-Verapamil and from 200 μg/ml without to 25 μg/ml with R-Verapamil in KB 3-1 (MDR1⁺⁺⁺, CYP3A5) cells. The effect of MDR1 inhibition during SN-38 treatment is even stronger in these MDR1 high expresser cells, R-Verapamil blocked the MDR1 transport completely and they become as sensitive as KB 3-1 cells.

[0208] These results demonstrate that the MDR1 activity is relevant for resistance of cancer cells to CPT-11 and SN-38 and that inhibition of MDR1 sensitises the cells, so that they are more efficiently killed at lower drug concentrations.

### EXAMPLE 10

### CYP3A5 Activity Influences Resistance to CPT-11

[0209] KB 3-1 (MDR1⁺⁺⁺) and KB 3-1 (MDR1⁺⁺⁺, CYP3A5) cells which differ by their amounts of CYP3A5 (FIG. 29). Four wells of each cell line were incubated with serial dilutions of CPT-11, SN-38 and analyzed as described above. Two wells were additionally treated with the MDR1 inhibitor R-Verapamil.

[0210] Because MDR1 activity is a major determinant of cellular sensitivity toward CPT11 and SN-38, the MDR1 activity in these MDR1 high expresser cell lines was completely blocked using an excess of the specific MDR1 inhibitor R-Verapamil to analyze the impact of CYP3A5 on CPT-11 and SN-38 sensitivity without interference of MDR1.

[0211] The high CYP3A5 expresser cell line KB 3-1 (MDR1⁺⁺, CYP3A5) is with an IC₅₀ of 25 μg/ml 2.5-times more resistant to CPT-11 than KB 3-1 (MDR1⁺⁺⁺) showing an IC₅₀ of 10 μg/ml (FIG. 34). No difference between these two cell lines can be observed regarding their sensitivity towards SN-38.

[0212] These experiments demonstrate a significant impact of CYP3A5 expression on the resistance to CPT-11 in contrast to SN-38. The fact that CYP3A5 activity had no influence on SN-38 toxicity further confirms the CYP3A5 effect, because CPT-11 but not SN-38 is metabolized by CYP3A5.

### EXAMPLE 11

### MDR1 Genotyping Improves Therapeutic Efficacy of Irinotecan by Genotype-based Prediction and Monitoring of Drug Resistance

[0213] Therapeutic efficacy and adverse effects of irinotecan depend on plasma levels and on intracellular tumor concentrations of the parent compound and the active metabolites (e.g. SN-38). The MDR1 gene controls the PGP-dependent penetration of irinotecan across membranes [Luo et al., Drug Metab Dispos 2002, 30:763-770; Jansen et al., Br J Cancer 1998, 77:359-65 Chu et al., J Pharmacol Exp Ther 1999; 288, 735-41; Sugiyama et al., Cancer Chemother Pharmacol 1998, 42 Suppl:S44-9] and is therefore an important determinant for its systemic availability and intracellular accumulation. The 176C>T nucleotide substitution (SEQ ID NOs. 217, 218, 219, and 220) of the MDR1 gene (Accession No: M29445) is associated with low PGP expression-related low drug efflux and patient carrying this substitution are more likely to respond to irinotecan treatment for two reasons: 1) Due to the lower amount of PGP in enterocytes more irinotecan can enter the body across the intestinal barrier causing more irinotecan to reach its site of action, the tumor. 2) Due to the lower amount of PGP in the tumor cell membranes more irinotecan can penetrate into the tumor cells to deploy its cytotoxic effects. The currently used standard dose of irinotecan kills highly effective most tumor cells within the first cycles of chemotherapy with only very few surviving drug-resistant tumor cells and tolerable adverse events. Independently from the mechanisms of drug resistance, in these patients, the number of surviving cells is to small to develop into a drug-resistant tumor which does not respond any longer to irinotecan therapy.

[0214] Patients with the high expresser MDR1 genotype (nucleotide C at position 176 of the MDR1 gene, Accession No: M29445) are less likely to respond to irinotecan treatment. Higher doses would be necessary to achieve a sufficiently efficient killing of tumor cells in order to prevent the development of a drug-resistant tumor. However, elevation of irinotecan dosage is limited due to the occurrence of intolerable adverse events (e.g. diarrhea, neutropenia, or thromboembolic complications). Alternatively, efficacy of irinotecan treatment can be improved by addition of a PGP inhibitor. A PGP inhibitor blocks efficiently the PGP function in MDR1 high expresser patients in such a way as to enable irinotecan to concentrate in the tumor cells for exerting its cytotoxicity as effective as in MDR1 low expresser patients. Consequently, genotypically MDR1 high expresser patients become phenotypically comparable to MDR1 low expressers.

[0215] According to the number of low or high expresser alleles of the MDR1 gene, individuals can be classified as having either extensive (ET, two high expresser alleles), intermediate (IT, one high expresser, one low expresser allele) or poor transport capacity (PT, two low expresser alleles). By genetic testing prior to onset of treatment with irinotecan, patients can be classified as ET, IT, or PT and the MDR1 -related transport capacity of the patients can be predicted. The individual risk of an insufficient anticancer treatment increases with the number of MDR1 high expresser alleles. Individuals with ET genotype are at the highest risk to suffer from insufficient response to irinotecan and are at the highest risk to develop a drug resistant tumor. ET patients should be treated with a PGP-inhibitor in addition to irinotecan and more closely monitored for adverse events and for the development of chemotherapy-related drug-resistance. Furthermore, these patients, who are at high risk for developing a drug-resistant tumor, can particularly benefit from taking a tumor biopsy between each cycle of chemotherapy with subsequent individual profiling of tumor cells for drug resistance.

The application's sequence listing, which the Patent Office published only in electronic form, follows.

SEQUENCE LISTING (683 sequences)

SEQ ID NO: 1 - DNA, 21 bp, Homo sapiens
gtcctgggccggctgctgtgt

SEQ ID NO: 2 - DNA, 21 bp, Homo sapiens
acacagcagccggcccaggac

SEQ ID NO: 3 - DNA, 21 bp, Homo sapiens
  misc_feature (11)..(11): k=t or g
gtcctgggcckgctgctgtgt

SEQ ID NO: 4 - DNA, 21 bp, Homo sapiens
  misc_feature (11)..(11): m=a or c
acacagcagcmggcccaggac

SEQ ID NO: 5 - DNA, 21 bp, Homo sapiens
ggccatccagtagctgcagca

SEQ ID NO: 6 - DNA, 21 bp, Homo sapiens
tgctgcagctactggatggcc

SEQ ID NO: 7 - DNA, 21 bp, Homo sapiens
  misc_feature (11)..(11): y=t or c
ggccatccagyagctgcagca

SEQ ID NO: 8 - DNA, 21 bp, Homo sapiens
  misc_feature (11)..(11): r=g or a
tgctgcagctragctgcagca

SEQ ID NO: 9 - DNA, 21 bp, Homo sapiens
catcagagacagagcatttta

SEQ ID NO: 10 - DNA, 21 bp, Homo sapiens
taaaatgctctgtctctgatg

SEQ ID NO: 11 - DNA, 21 bp, Homo sapiens
  misc_feature (11)..(11): r=g or a
catcagagacrgagcatttta

SEQ ID NO: 12 - DNA, 21 bp, Homo sapiens
  misc_feature (11)..(11): y=t or c
taaaatgctcygtctctgatg

SEQ ID NO: 13 - DNA, 21 bp, Homo sapiens
ttgcatgcacagccatgcagc

SEQ ID NO: 14 - DNA, 21 bp, Homo sapiens
gctgcatggctgtgcatgcaa

SEQ ID NO: 15 - DNA, 21 bp, Homo sapiens
  misc_feature (11)..(11): w=a or t
ttgcatgcacwgccatgcagc

SEQ ID NO: 16 - DNA, 21 bp, Homo sapiens
  misc_feature (11)..(11): k=g or t
gctgcatggckgtgcatgcaa

SEQ ID NO: 17 - DNA, 21 bp, Homo sapiens
tgcactgccacgcagcctgga

SEQ ID NO: 18 - DNA, 21 bp, Homo sapiens
tccaggctgcggtgcatgcaa

SEQ ID NO: 19 - DNA, 21 bp, Homo sapiens
  misc_feature (11)..(11): y=t or c
tgcactgccaygcagcctgga

SEQ ID NO: 20 - DNA, 21 bp, Homo sapiens
  misc_feature (11)..(11): r=a or g
tccaggctgcrgtgcatgcaa

SEQ ID NO: 21 - DNA, 21 bp, Homo sapiens
cttcctgcagtgggtgaagaa

SEQ ID NO: 22 - DNA, 21 bp, Homo sapiens
ttcttcacccactgcaggaag

SEQ ID NO: 23 - DNA, 21 bp, Homo sapiens
  misc_feature (11)..(11): y=t or c
cttcctgcagygggtgaagaa

SEQ ID NO: 24 - DNA, 21 bp, Homo sapiens
  misc_feature (11)..(11): r=g or a
ttcttcacccrctgcaggaag

SEQ ID NO: 25 - DNA, 21 bp, Homo sapiens
gtttattcccagtatgcaacc

SEQ ID NO: 26 - DNA, 21 bp, Homo sapiens
ggttgcatactgggaataaac

SEQ ID NO: 27 - DNA, 21 bp, Homo sapiens
  misc_feature (11)..(11): m=a or c
gtttattcccmgtatgcaacc

SEQ ID NO: 28 - DNA, 21 bp, Homo sapiens
  misc_feature (11)..(11): k=g or t
ggttgcatackgggaataaac

SEQ ID NO: 29 - DNA, 21 bp, Homo sapiens
ggtttttgttcgtggaatcaa

SEQ ID NO: 30 - DNA, 21 bp, Homo sapiens
ttgattccacgaacaaaaacc

SEQ ID NO: 31 - DNA, 21 bp, Homo sapiens
  misc_feature (11)..(11): s=c or g
ggtttttgttsgtggaatcaa

SEQ ID NO: 32 - DNA, 21 bp, Homo sapiens
  misc_feature (11)..(11): s=c or g
ttgattccacsaacaaaaacc

SEQ ID NO: 33 - DNA, 21 bp, Homo sapiens
gaatcaactgacttcaccaaa

SEQ ID NO: 34 - DNA, 21 bp, Homo sapiens
tttggtgaagtcagttgattc

SEQ ID NO: 35 - DNA, 21 bp, Homo sapiens
  misc_feature (11)..(11): m=a or c
gaatcaactgmcttcaccaaa

SEQ ID NO: 36 - DNA, 21 bp, Homo sapiens
  misc_feature (11)..(11): k=g or t
tttggtgaagkcagttgattc

SEQ ID NO: 37 - DNA, 21 bp, Homo sapiens
gaatttgaagtctacattaat

SEQ ID NO: 38 - DNA, 21 bp, Homo sapiens
attaatgtagacttcaaattc

SEQ ID NO: 39 - DNA, 21 bp, Homo sapiens
  misc_feature (11)..(11): y=c or t
gaatttgaagyctacattaat

SEQ ID NO: 40 - DNA, 21 bp, Homo sapiens
  misc_feature (11)..(11): r=a or g
attaatgtagrcttcaaattc

SEQ ID NO: 41 - DNA, 21 bp, Homo sapiens
ttctctttggaatcaatggtc

SEQ ID NO: 42 - DNA, 21 bp, Homo sapiens
gaccattgattccaaagagaa

SEQ ID NO: 43 - DNA, 21 bp, Homo sapiens
  misc_feature (11)..(11): r=a or g
ttctctttggratcaatggtc

SEQ ID NO: 44 - DNA, 21 bp, Homo sapiens
  misc_feature (11)..(11): y=c or t
gaccattgatyccaaagagaa

SEQ ID NO: 45 - DNA, 21 bp, Homo sapiens
caaaatcccttagacagtcct

SEQ ID NO: 46 - DNA, 21 bp, Homo sapiens
aggactgtctaagggattttg

SEQ ID NO: 47 - DNA, 21 bp, Homo sapiens
  misc_feature (11)..(11): y=c or t
caaaatccctyagacagtcct

SEQ ID NO: 48 - DNA, 21 bp, Homo sapiens
  misc_feature (11)..(11): r=a or g
aggactgtctragggattttg

SEQ ID NO: 49 - DNA, 21 bp, Homo sapiens
aaaatccctcggacagtcctg

SEQ ID NO: 50 - DNA, 21 bp, Homo sapiens
caggactgtccgagggatttt

SEQ ID NO: 51 - DNA, 21 bp, Homo sapiens
  misc_feature (11)..(11): r=a or g
aaaatccctcrgacagtcctg

SEQ ID NO: 52 - DNA, 21 bp, Homo sapiens
  misc_feature (11)..(11): y=c or t
caggactgtcygagggatttt

SEQ ID NO: 53 - DNA, 21 bp, Homo sapiens
cagtcctgtgacggtacactg

SEQ ID NO: 54 - DNA, 21 bp, Homo sapiens
cagtgtaccgtcacaggactg

SEQ ID NO: 55 - DNA, 21 bp, Homo sapiens
  misc_feature (11)..(11): r=a or g
cagtcctgtgrcggtacactg

SEQ ID NO: 56 - DNA, 21 bp, Homo sapiens
  misc_feature (11)..(11): y=c or t
cagtgtaccgycacaggactg

SEQ ID NO: 57 - DNA, 21 bp, Homo sapiens
gtggctaccctaaaacgatct

SEQ ID NO: 58 - DNA, 21 bp, Homo sapiens
agatcgttttagggtagccac

SEQ ID NO: 59 - DNA, 21 bp, Homo sapiens
  misc_feature (11)..(11): y=c or t
gtggctacccyaaaacgatct

SEQ ID NO: 60 - DNA, 21 bp, Homo sapiens
  misc_feature (11)..(11): r=a or g
agatcgttttrgggtagccac

SEQ ID NO: 61 - DNA, 21 bp, Homo sapiens
tggctaccccgaaacgatctg

SEQ ID NO: 62 - DNA, 21 bp, Homo sapiens
cagatcgtttcggggtagcca

SEQ ID NO: 63 - DNA, 21 bp, Homo sapiens
  misc_feature (11)..(11): r=a or g
tggctaccccraaacgatctg

SEQ ID NO: 64 - DNA, 21 bp, Homo sapiens
  misc_feature (11)..(11): y=c or t
cagatcgtttyggggtagcca

SEQ ID NO: 65 - DNA, 21 bp, Homo sapiens
cccgatgaccggtgcctttat

SEQ ID NO: 66 - DNA, 21 bp, Homo sapiens
ataaaggcaccggtcatcggg

SEQ ID NO: 67 - DNA, 21 bp, Homo sapiens
  misc_feature (11)..(11): s=c or g
cccgatgaccsgtgcctttat

SEQ ID NO: 68 - DNA, 21 bp, Homo sapiens
  misc_feature (11)..(11): s=c or g
ataaaggcacsggtcatcggg

SEQ ID NO: 69 - DNA, 21 bp, Homo sapiens
gatgacccgtacctttatcac

SEQ ID NO: 70 - DNA, 21 bp, Homo sapiens
gtgataaaggtacgggtcatc

SEQ ID NO: 71 - DNA, 21 bp, Homo sapiens
  misc_feature (11)..(11): r=a or g
gatgacccgtrcctttatcac

SEQ ID NO: 72 - DNA, 21 bp, Homo sapiens
  misc_feature (11)..(11): y=c or t
gtgataaaggyacgggtcatc

SEQ ID NO: 73 - DNA, 21 bp, Homo sapiens
catgctggtttccatggtgtt

SEQ ID NO: 74 - DNA, 21 bp, Homo sapiens
aacaccatggaaaccagcatg

SEQ ID NO: 75 - DNA, 21 bp, Homo sapiens
  misc_feature (11)..(11): y=c or t
catgctggttyccatggtgtt

SEQ ID NO: 76 - DNA, 21 bp, Homo sapiens
  misc_feature (11)..(11): r=a or g
aacaccatggraaccagcatg

SEQ ID NO: 77 - DNA, 21 bp, Homo sapiens
tttatgaaaggatatgcaatg

SEQ ID NO: 78 - DNA, 21 bp, Homo sapiens
cattgcatatcctttcataaa

SEQ ID NO: 79 - DNA, 21 bp, Homo sapiens
  misc_feature (11)..(11): s=c or g
tttatgaaagsatatgcaatg

SEQ ID NO: 80 - DNA, 21 bp, Homo sapiens
  misc_feature (11)..(11): s=c or g
cattgcatatsctttcataaa

SEQ ID NO: 81 - DNA, 22 bp, Homo sapiens
aatggcgttcgtatggtgatga

SEQ ID NO: 82 - DNA, 22 bp, Homo sapiens
tcatcaccatacgaacgccatt

SEQ ID NO: 83 - DNA, 21 bp, Homo sapiens
  misc_feature (11)..(11): y=cc or gt
aatggcgttcyatggtgatga

SEQ ID NO: 84 - DNA, 22 bp, Homo sapiens
  misc_feature (11)..(12): sr=gg or ac
tcatcaccatsrgaacgccatt

SEQ ID NO: 85 - DNA, 21 bp, Homo sapiens
gatggacaatccaaagcgcat

SEQ ID NO: 86 - DNA, 21 bp, Homo sapiens
atgcgctttggattgtccatc

SEQ ID NO: 87 - DNA, 21 bp, Homo sapiens
  misc_feature (11)..(11): s=c or g
gatggacaatscaaagcgcat

SEQ ID NO: 88 - DNA, 21 bp, Homo sapiens
  misc_feature (11)..(11): s=c or g
atgcgctttgsattgtccatc

SEQ ID NO: 89 - DNA, 21 bp, Homo sapiens
aaatgctctagaagcagtcat

SEQ ID NO: 90 - DNA, 21 bp, Homo sapiens
atgactgcttctagagcattt

SEQ ID NO: 91 - DNA, 21 bp, Homo sapiens
  misc_feature (11)..(11): r=a or g
aaatgctctaraagcagtcat

SEQ ID NO: 92 - DNA, 21 bp, Homo sapiens
  misc_feature (11)..(11): y=c or t
atgactgcttytagagcattt

SEQ ID NO: 93 - DNA, 21 bp, Homo sapiens
caaaagttactaggagaacat

SEQ ID NO: 94 - DNA, 21 bp, Homo sapiens
atgttctcctagtaacttttg

SEQ ID NO: 95 - DNA, 21 bp, Homo sapiens
  misc_feature (11)..(11): w=a or t
caaaagttacwaggagaacat

SEQ ID NO: 96 - DNA, 21 bp, Homo sapiens
  misc_feature (11)..(11): w=a or t
atgttctcctwgtaacttttg

SEQ ID NO: 97 - DNA, 21 bp, Homo sapiens
ctggtaccaggaccattcctt

SEQ ID NO: 98 - DNA, 21 bp, Homo sapiens
aaggaatggtcctggtaccag

SEQ ID NO: 99 - DNA, 21 bp, Homo sapiens
  misc_feature (11)..(11): k=g or t
ctggtaccagkaccattcctt

SEQ ID NO: 100 - DNA, 21 bp, Homo sapiens
  misc_feature (11)..(11): m=a or c
aaggaatggtmctggtaccag

SEQ ID NO: 101 - DNA, 21 bp, Homo sapiens
cagtaccatttcttggacgtg

SEQ ID NO: 102 - DNA, 21 bp, Homo sapiens
cacgtccaagaaatggtactg

SEQ ID NO: 103 - DNA, 21 bp, Homo sapiens
  misc_feature (11)..(11): y=c or t
cagtaccattycttggacgtg

SEQ ID NO: 104 - DNA, 21 bp, Homo sapiens
  misc_feature (11)..(11): r=a or g
cacgtccaagraatggtactg

SEQ ID NO: 105 - DNA, 20 bp, Homo sapiens
taaaaaaggactgctatgct

SEQ ID NO: 106 - DNA, 20 bp, Homo sapiens
agcatagcagtcctttttta

SEQ ID NO: 107 - DNA, 21 bp, Homo sapiens
  misc_feature (11)..(12): nn=ctc or c
taaaaaagganntgctatgct

SEQ ID NO: 108 - DNA, 21 bp, Homo sapiens
  misc_feature (11)..(12): nn=agt or t
agcatagcagnncctttttta

SEQ ID NO: 109 - DNA, 20 bp, Homo sapiens
gcccactgtattcttgcatg

SEQ ID NO: 110 - DNA, 20 bp, Homo sapiens
catgcaagaatacagtgggc

SEQ ID NO: 111 - DNA, 21 bp, Homo sapiens
  misc_feature (11)..(12): nn=ttct or t
gcccactgtanntcttgcatg

SEQ ID NO: 112 - DNA, 21 bp, Homo sapiens
  misc_feature (11)..(12): nn=gaat or t
catgcaagaannacagtgggc

SEQ ID NO: 113 - DNA, 20 bp, Homo sapiens
atttgaagcctggagaacat

SEQ ID NO: 114 - DNA, 20 bp, Homo sapiens
atgttctccaggcttcaaat

SEQ ID NO: 115 - DNA, 21 bp, Homo sapiens
  misc_feature (11)..(12): nn=tacattaatgcttct or t
atttgaagccnnggagaacat

SEQ ID NO: 116 - DNA, 21 bp, Homo sapiens
  misc_feature (11)..(12): nn=gaagcattaatgtag or g
atgttctccanngcttcaaat

SEQ ID NO: 117-128 - skipped (12 entries)

SEQ ID NO: 129 - DNA, 23 bp, Homo sapiens
ctgacggacccttttccttcctt

SEQ ID NO: 130 - DNA, 23 bp, Homo sapiens
aaggaaggaaatgggtccgtcag

SEQ ID NO: 131 - DNA, 23 bp, Homo sapiens
  misc_feature (12)..(13): nn=tt or t
ctgacggacccnnttccttcctt

SEQ ID NO: 132 - DNA, 23 bp, Homo sapiens
  misc_feature (12)..(13): nn=ag or g
aaggaaggaaannggtccgtcag

SEQ ID NO: 133 - DNA, 23 bp, Homo sapiens
caatgcaaagcggcatggagact

SEQ ID NO: 134 - DNA, 23 bp, Homo sapiens
agtctccatgccgctttgcattg

SEQ ID NO: 135 - DNA, 23 bp, Homo sapiens
  misc_feature (12)..(13): nn=gg or g
caatgcaaagcnncatggagact

SEQ ID NO: 136 - DNA, 23 bp, Homo sapiens
  misc_feature (12)..(13): nn=cg or g
agtctccatgcnnctttgcattg

SEQ ID NO: 137 - DNA, 11 bp, Homo sapiens
aaggacttcta

SEQ ID NO: 138 - DNA, 11 bp, Homo sapiens
tagaagtcctt

SEQ ID NO: 139 - DNA, 11 bp, Homo sapiens
  misc_feature (6)..(6): y=c or t
aaggayttcta

SEQ ID NO: 140 - DNA, 11 bp, Homo sapiens
  misc_feature (6)..(6): r=a or g
tagaartcctt

SEQ ID NO: 141 - DNA, 11 bp, Homo sapiens
tgggcgtgcaa

SEQ ID NO: 142 - DNA, 11 bp, Homo sapiens
ttgcacgccca

SEQ ID NO: 143 - DNA, 11 bp, Homo sapiens
  misc_feature (6)..(6): k=g or t
tgggcktgcaa

SEQ ID NO: 144 - DNA, 11 bp, Homo sapiens
  misc_feature (6)..(6): m=a or c
ttgcamgccca

SEQ ID NO: 145 - DNA, 11 bp, Homo sapiens
gccccgcctcc

SEQ ID NO: 146 - DNA, 11 bp, Homo sapiens
ggaggcggggc

SEQ ID NO: 147 - DNA, 11 bp, Homo sapiens
  misc_feature (6)..(6): r=a or g
gccccrcctcc

SEQ ID NO: 148 - DNA, 11 bp, Homo sapiens
  misc_feature (6)..(6): y=c or t
ggaggyggggc

SEQ ID NO: 149 - DNA, 11 bp, Homo sapiens
ctcacgctggg

SEQ ID NO: 150 - DNA, 11 bp, Homo sapiens
cccagcgtgag

SEQ ID NO: 151 - DNA, 11 bp, Homo sapiens
  misc_feature (6)..(6): r=a or g
ctcacrctggg

SEQ ID NO: 152 - DNA, 11 bp, Homo sapiens
  misc_feature (6)..(6): y=c or t
cccagygtctc

SEQ ID NO: 153-168 - skipped (16 entries)

SEQ ID NO: 169 - DNA, 21 bp, Homo sapiens
cccaaaacacacacaccctgc

SEQ ID NO: 170 - DNA, 21 bp, Homo sapiens
gcagggtgtgtgtgttttggg

SEQ ID NO: 171 - DNA, 21 bp, Homo sapiens
  misc_feature (11)..(11): r=a or g
cccaaaacacrcacaccctgc

SEQ ID NO: 172 - DNA, 21 bp, Homo sapiens
  misc_feature (11)..(11): y=c or t
gcagggtgtgygtgttttggg

SEQ ID NO: 173 - DNA, 21 bp, Homo sapiens
acgctcagagtttcatggact

SEQ ID NO: 174 - DNA, 21 bp, Homo sapiens
agtccatgaaactctgagcgt

SEQ ID NO: 175 - DNA, 21 bp, Homo sapiens
  misc_feature (11)..(11): k=g or t
acgctcagagkttcatggact

SEQ ID NO: 176 - DNA, 21 bp, Homo sapiens
  misc_feature (11)..(11): m=a or c
agtccatgaamctctgagcgt

SEQ ID NO: 177 - DNA, 21 bp, Homo sapiens
gcaggtggccttgtgcacatt

SEQ ID NO: 178 - DNA, 21 bp, Homo sapiens
aatgtgcacaaggccacctgc

SEQ ID NO: 179 - DNA, 21 bp, Homo sapiens
  misc_feature (11)..(11): y=c or t
gcaggtggccytgtgcacatt

SEQ ID NO: 180 - DNA, 21 bp, Homo sapiens
  misc_feature (11)..(11): r=a or g
aatgtgcacarggccacctgc

SEQ ID NO: 181 - DNA, 21 bp, Homo sapiens
ttgccgtctatgtgaccattg

SEQ ID NO: 182 - DNA, 21 bp, Homo sapiens
caatggtcacatagacggcaa

SEQ ID NO: 183 - DNA, 21 bp, Homo sapiens
  misc_feature (11)..(11): y=c or t
ttgccgtctaygtgaccattg

SEQ ID NO: 184 - DNA, 21 bp, Homo sapiens
  misc_feature (11)..(11): r=a or g
caatggtcacrtagacggcaa

SEQ ID NO: 185 - DNA, 21 bp, Homo sapiens
gattctctccaagaaaacatc

SEQ ID NO: 186 - DNA, 21 bp, Homo sapiens
gatgttttcttggagagaatc

SEQ ID NO: 187 - DNA, 21 bp, Homo sapiens
  misc_feature (11)..(11): r=a or g
gattctctccragaaaacatc

SEQ ID NO: 188 - DNA, 21 bp, Homo sapiens
  misc_feature (11)..(11): y=c or t
gatgttttctyggagagaatc

SEQ ID NO: 189 - DNA, 21 bp, Homo sapiens
ctgggaagtcatccctgaccc

SEQ ID NO: 190 - DNA, 21 bp, Homo sapiens
gggtcagggatgacttcccag

SEQ ID NO: 191 - DNA, 21 bp, Homo sapiens
  misc_feature (11)..(11): r=a or g
ctgggaagtcrtccctgaccc

SEQ ID NO: 192 - DNA, 21 bp, Homo sapiens
  misc_feature (11)..(11): y=c or t
gggtcagggaygacttcccag

SEQ ID NO: 193 - DNA, 21 bp, Homo sapiens
ccacggcagctgtggacctgg

SEQ ID NO: 194 - DNA, 21 bp, Homo sapiens
ccaggtccacagctgccgtgg

SEQ ID NO: 195 - DNA, 21 bp, Homo sapiens
  misc_feature (11)..(11): y=c or t
ccacggcagcygtggacctgg

SEQ ID NO: 196 - DNA, 21 bp, Homo sapiens
  misc_feature (11)..(11): r=a or g
ccaggtccacrgctgccgtgg

SEQ ID NO: 197 - DNA, 21 bp, Homo sapiens
ccaggcagccagtgaaggttg

SEQ ID NO: 198 - DNA, 21 bp, Homo sapiens
caaccttcactggctgcctgg

SEQ ID NO: 199 - DNA, 21 bp, Homo sapiens
  misc_feature (11)..(11): r=a or g
ccaggcagccrgtgaaggttg

SEQ ID NO: 200 - DNA, 21 bp, Homo sapiens
  misc_feature (11)..(11): y=c or t
caaccttcacyggctgcctgg

SEQ ID NO: 201 - DNA, 21 bp, Homo sapiens
cggtgaaggtcgtgtactcct

SEQ ID NO: 202 - DNA, 21 bp, Homo sapiens
aggagtacacgaccttcaccg

SEQ ID NO: 203 - DNA, 21 bp, Homo sapiens
  misc_feature (11)..(11): y=c or t
cggtgaaggtygtgtactcct

SEQ ID NO: 204 - DNA, 21 bp, Homo sapiens
  misc_feature (11)..(11): r=a or g
aggagtacacraccttcaccg

SEQ ID NO: 205 - DNA, 21 bp, Homo sapiens
ctcatgagctgcttcttcaag

SEQ ID NO: 206 - DNA, 21 bp, Homo sapiens
cttgaagaagcagctcatgag

SEQ ID NO: 207 - DNA, 21 bp, Homo sapiens
  misc_feature (11)..(11): k=g or t
ctcatgagctkcttcttcaag

SEQ ID NO: 208 - DNA, 21 bp, Homo sapiens
  misc_feature (11)..(11): m=a or c
cttgaagaagmagctcatgag

SEQ ID NO: 209 - DNA, 21 bp, Homo sapiens
agttcgtgaacgacacgaagg

SEQ ID NO: 210 - DNA, 21 bp, Homo sapiens
ccttcgtgtcgttcacgaact

SEQ ID NO: 211 - DNA, 21 bp, Homo sapiens
  misc_feature (11)..(11): y=c or t
agttcgtgaaygacacgaagg

SEQ ID NO: 212 - DNA, 21 bp, Homo sapiens
  misc_feature (11)..(11): r=a or g
ccttcgtgtcrttcacgaact

SEQ ID NO: 213 - DNA, 21 bp, Homo sapiens
ggcagtgggctgagggagtgg

SEQ ID NO: 214 - DNA, 21 bp, Homo sapiens
ccactccctcagcccactgcc

SEQ ID NO: 215 - DNA, 21 bp, Homo sapiens
  misc_feature (11)..(11): y=c or t
ggcagtgggcygagggagtgg

SEQ ID NO: 216 - DNA, 21 bp, Homo sapiens
  misc_feature (11)..(11): r=a or g
ccactccctcrgcccactgcc

SEQ ID NO: 217 - DNA, 21 bp, Homo sapiens
gccagttggagtcacttgggg

SEQ ID NO: 218 - DNA, 21 bp, Homo sapiens
ccccaagtgactccaactggc

SEQ ID NO: 219 - DNA, 21 bp, Homo sapiens
  misc_feature (11)..(11): s=c or g
gccagttggastcacttgggg

SEQ ID NO: 220 - DNA, 21 bp, Homo sapiens
  misc_feature (11)..(11): s=c or g
ccccaagtgastccaactggc

SEQ ID NO: 221 - DNA, 21 bp, Homo sapiens
actctcactcggggcacagca

SEQ ID NO: 222 - DNA, 21 bp, Homo sapiens
tgctgtgccccgagtgagagt

SEQ ID NO: 223 - DNA, 21 bp, Homo sapiens
  misc_feature (11)..(11): r=a or g
actctcactcrgggcacagca

SEQ ID NO: 224 - DNA, 21 bp, Homo sapiens
  misc_feature (11)..(11): y=c or t
tgctgtgcccygagtgagagt

SEQ ID NO: 225 - DNA, 21 bp, Homo sapiens
tcgttgatcacatctgtctgt

SEQ ID NO: 226 - DNA, 21 bp, Homo sapiens
acagacagatgtgatcaacga

SEQ ID NO: 227 - DNA, 21 bp, Homo sapiens
  misc_feature (11)..(11): s=c or g
tcgttgatcasatctgtctgt

SEQ ID NO: 228 - DNA, 21 bp, Homo sapiens
  misc_feature (11)..(11): s=c or g
acagacagatstgatcaacga

SEQ ID NO: 229 - DNA, 21 bp, Homo sapiens
gtgcactcacatggccgggtg

SEQ ID NO: 230 - DNA, 21 bp, Homo sapiens
cacccggccatgtgagtgcac

SEQ ID NO: 231 - DNA, 21 bp, Homo sapiens
  misc_feature (11)..(11): r=a or g
gtgcactcacrtggccgggtg

SEQ ID NO: 232 - DNA, 21 bp, Homo sapiens
  misc_feature (11)..(11): y=c or t
cacccggccaygtgagtgcac

SEQ ID NO: 233 - DNA, 21 bp, Homo sapiens
catgtgcactcacgtggccgg

SEQ ID NO: 234 - DNA, 21 bp, Homo sapiens
ccggccacgtgagtgcacatg

SEQ ID NO: 235 - DNA, 21 bp, Homo sapiens
  misc_feature (11)..(11): s=c or g
catgtgcactsacgtggccgg

SEQ ID NO: 236 - DNA, 21 bp, Homo sapiens
  misc_feature (11)..(11): s=c or g
ccggccacgtsagtgcacatg

SEQ ID NO: 237 - DNA, 21 bp, Homo sapiens
gtttcgttgtagggggtggga

SEQ ID NO: 238 - DNA, 21 bp, Homo sapiens
tcccaccccctacaacgaaac

SEQ ID NO: 239 - DNA, 21 bp, Homo sapiens
  misc_feature (11)..(11): r=a or g
gtttcgttgtrgggggtggga

SEQ ID NO: 240 - DNA, 21 bp, Homo sapiens
  misc_feature (11)..(11): y=c or t
tcccacccccyacaacgaaac

SEQ ID NO: 241 - DNA, 21 bp, Homo sapiens
tgtctaattacagaaatggat

SEQ ID NO: 242 - DNA, 21 bp, Homo sapiens
atccatttctgtaattagaca

SEQ ID NO: 243 - DNA, 21 bp, Homo sapiens
  misc_feature (11)..(11): y=c or t
tgtctaattayagaaatggat

SEQ ID NO: 244 - DNA, 21 bp, Homo sapiens
  misc_feature (11)..(11): r=a or g
atccatttctrtaattagaca

SEQ ID NO: 245 - DNA, 21 bp, Homo sapiens
ccatgtcagcatgacacaggt

SEQ ID NO: 246 - DNA, 21 bp, Homo sapiens
acctgtgtcatgctgacatgg

SEQ ID NO: 247 - DNA, 21 bp, Homo sapiens
  misc_feature (11)..(11): r=a or g
ccatgtcagcrtgacacaggt

SEQ ID NO: 248 - DNA, 21 bp, Homo sapiens
  misc_feature (11)..(11): y=c or t
acctgtgtcaygctgacatgg

SEQ ID NO: 249 - DNA, 20 bp, Homo sapiens
ctggttttttcttccggtca

SEQ ID NO: 250 - DNA, 20 bp, Homo sapiens
tgaccggaagaaaaaaccag

SEQ ID NO: 251 - DNA, 21 bp, Homo sapiens
  misc_feature (11)..(12): nn=c or tc
ctggttttttnnttccggtca

SEQ ID NO: 252 - DNA, 22 bp, Homo sapiens
  misc_feature (11)..(12): nn=a or aa
tgaccggaagnnaaaaaaccag

SEQ ID NO: 253 - DNA, 21 bp, Homo sapiens
tgtctccttttgcttctccca

SEQ ID NO: 254 - DNA, 21 bp, Homo sapiens
tgggagaagcaaaaggagaca

SEQ ID NO: 255 - DNA, 21 bp, Homo sapiens
  misc_feature (11)..(11): y=c or t
tgtctcctttygcttctccca

SEQ ID NO: 256 - DNA, 21 bp, Homo sapiens
  misc_feature (11)..(11): r=a or g
tgggagaagcraaaggagaca

SEQ ID NO: 257 - DNA, 21 bp, Homo sapiens
cactggcacaatggcctctag

SEQ ID NO: 258 - DNA, 21 bp, Homo sapiens
ctagaggccattgtgccagtg

SEQ ID NO: 259 - DNA, 21 bp, Homo sapiens
  misc_feature (11)..(11): r=a or g
cactggcacartggcctctag

SEQ ID NO: 260 - DNA, 21 bp, Homo sapiens
  misc_feature (11)..(11): y=c or t
ctagaggccaytgtgccagtg

SEQ ID NO: 261 - DNA, 21 bp, Homo sapiens
tgtgaccacaaatgagtgtgt

SEQ ID NO: 262 - DNA, 21 bp, Homo sapiens
acacactcatttgtggtcaca

SEQ ID NO: 263 - DNA, 21 bp, Homo sapiens
  misc_feature (11)..(11): r=a or g
tgtgaccacaratgagtgtgt

SEQ ID NO: 264 - DNA, 21 bp, Homo sapiens
  misc_feature (11)..(11): y=c or t
acacactcatytgtggtcaca

SEQ ID NO: 265 - DNA, 21 bp, Homo sapiens
ccaggccccctagacctcagg

SEQ ID NO: 266 - DNA, 21 bp, Homo sapiens
cctgaggtctagggggcctgg

SEQ ID NO: 267 - DNA, 21 bp, Homo sapiens
  misc_feature (11)..(11): y=c or t
ccaggcccccyagacctcagg

SEQ ID NO: 268 - DNA, 21 bp, Homo sapiens
  misc_feature (11)..(11): r=a or g
cctgaggtctrgggggcctgg

SEQ ID NO: 269 - DNA, 21 bp, Homo sapiens
cctttccactactgtggcctc

SEQ ID NO: 270 - DNA, 21 bp, Homo sapiens
gaggccacagtagtggaaagg

SEQ ID NO: 271 - DNA, 21 bp, Homo sapiens
  misc_feature (11)..(11): m=a or c
cctttccactmctgtggcctc

SEQ ID NO: 272 - DNA, 21 bp, Homo sapiens
  misc_feature (11)..(11): k=g or t
gaggccacagkagtggaaagg

SEQ ID NO: 273 - DNA, 21 bp, Homo sapiens
cctgtggcctgaatccaggat

SEQ ID NO: 274 - DNA, 21 bp, Homo sapiens
atcctggattcaggccacagg

SEQ ID NO: 275 - DNA, 21 bp, Homo sapiens
  misc_feature (11)..(11): s=c or g
cctgtggcctsaatccaggat

SEQ ID NO: 276 - DNA, 21 bp, Homo sapiens
  misc_feature (11)..(11): s=c or g
atcctggattsaggccacagg

SEQ ID NO: 277 - DNA, 21 bp, Homo sapiens
aaggtagggggcgctgtgcca

SEQ ID NO: 278 - DNA, 21 bp, Homo sapiens
tggcacagcgccccctacctt

SEQ ID NO: 279 - DNA, 21 bp, Homo sapiens
  misc_feature (11)..(11): r=a or g
aaggtaggggrcgctgtgcca

SEQ ID NO: 280 - DNA, 21 bp, Homo sapiens
  misc_feature (11)..(11): y=c or t
tggcacagcgycccctacctt

SEQ ID NO: 281 - DNA, 21 bp, Homo sapiens
gcgtgcccagccctggggttt

SEQ ID NO: 282 - DNA, 21 bp, Homo sapiens
aaaccccagggctgggcacgc

SEQ ID NO: 283 - DNA, 21 bp, Homo sapiens
  misc_feature (11)..(11): y=c or t
gcgtgcccagycctggggttt

SEQ ID NO: 284 - DNA, 21 bp, Homo sapiens
  misc_feature (11)..(11): r=a or g
aaaccccaggrctgggcacgc

SEQ ID NO: 285 - DNA, 21 bp, Homo sapiens
agccttggagaatctggggtg

SEQ ID NO: 286 - DNA, 21 bp, Homo sapiens
caccccagattctccaaggct

SEQ ID NO: 287 - DNA, 21 bp, Homo sapiens
  misc_feature (11)..(11): r=a or g
agccttggagratctggggtg

SEQ ID NO: 288 - DNA, 21 bp, Homo sapiens
  misc_feature (11)..(11): y=c or t
caccccagatyctccaaggct

SEQ ID NO: 289 - DNA, 21 bp, Homo sapiens
ccttaaacagcatttgaaaag

SEQ ID NO: 290 - DNA, 21 bp, Homo sapiens
cttttcaaatgctgtttaagg

SEQ ID NO: 291 - DNA, 21 bp, Homo sapiens
  misc_feature (11)..(11): s=c or g
ccttaaacagsatttgaaaag

SEQ ID NO: 292 - DNA, 21 bp, Homo sapiens
  misc_feature (11)..(11): s=c or g
cttttcaaatsctgtttaagg

SEQ ID NO: 293 - DNA, 21 bp, Homo sapiens
gggaatcactaaacctctctg

SEQ ID NO: 294 - DNA, 21 bp, Homo sapiens
cagagaggtttagtgattccc

SEQ ID NO: 295 - DNA, 21 bp, Homo sapiens
  misc_feature (11)..(11): m=a or c
gggaatcactmaacctctctg

SEQ ID NO: 296 - DNA, 21 bp, Homo sapiens
  misc_feature (11)..(11): k=g or t
cagagaggttkagtgattccc

SEQ ID NO: 297 - DNA, 21 bp, Homo sapiens
tgtgatcggctcgcctcggct

SEQ ID NO: 298 - DNA, 21 bp, Homo sapiens
agccgaggcgagccgatcaca

SEQ ID NO: 299 - DNA, 21 bp, Homo sapiens
  misc_feature (11)..(11): y=c or t
tgtgatcggcycgcctcggct

SEQ ID NO: 300 - DNA, 21 bp, Homo sapiens
  misc_feature (11)..(11): r=a or g
agccgaggcgrgccgatcaca

SEQ ID NO: 301 - DNA, 21 bp, Homo sapiens
tgggggacccgggccaataaa

SEQ ID NO: 302 - DNA, 21 bp, Homo sapiens
tttattggcccgggtccccca

SEQ ID NO: 303 - DNA, 21 bp, Homo sapiens
  misc_feature (11)..(11): r=a or g
tgggggacccrggccaataaa

SEQ ID NO: 304 - DNA, 21 bp, Homo sapiens
  misc_feature (11)..(11): y=c or t
tttattggccygggtccccca

SEQ ID NO: 305 - DNA, 21 bp, Homo sapiens
aagagtagcaattttatcttg

SEQ ID NO: 306 - DNA, 21 bp, Homo sapiens
caagataaaattgctactctt

SEQ ID NO: 307 - DNA, 21 bp, Homo sapiens
  misc_feature (11)..(11): r=a or g
aagagtagcarttttatcttg

SEQ ID NO: 308 - DNA, 21 bp, Homo sapiens
  misc_feature (11)..(11): y=c or t
caagataaaaytgctactctt

SEQ ID NO: 309 - DNA, 21 bp, Homo sapiens
aaaaaaatccaaatccaaaaa

SEQ ID NO: 310 - DNA, 21 bp, Homo sapiens
tttttggatttggattttttt

SEQ ID NO: 311 - DNA, 21 bp, Homo sapiens
  misc_feature (11)..(11): m=a or c
aaaaaaatccmaatccaaaaa

SEQ ID NO: 312 - DNA, 21 bp, Homo sapiens
  misc_feature (11)..(11): k=g or t
tttttggattkggattttttt

SEQ ID NO: 313 - DNA, 21 bp, Homo sapiens
ctccttcccttgctaggtcct

SEQ ID NO: 314 - DNA, 21 bp, Homo sapiens
aggacctagcaagggaaggag

SEQ ID NO: 315 - DNA, 21 bp, Homo sapiens
  misc_feature (11)..(11): y=c or t
ctccttccctygctaggtcct

SEQ ID NO: 316 - DNA, 21 bp, Homo sapiens
  misc_feature (11)..(11): r=a or g
aggacctagcragggaaggag

SEQ ID NO: 317 - DNA, 20 bp, Homo sapiens
agtctcacacgtgcactcac

SEQ ID NO: 318 - DNA, 20 bp, Homo sapiens
gtgagtgcacgtgtgagact

SEQ ID NO: 319 - DNA, 21 bp, Homo sapiens
  misc_feature (11)..(12): nn=g or atg
agtctcacacnntgcactcac

SEQ ID NO: 320 - DNA, 21 bp, Homo sapiens
  misc_feature (11)..(12): nn=g or atg
gtgagtgcacnntgtgagact

SEQ ID NO: 321 - DNA, 20 bp, Homo sapiens
actccaggcaggctccgttc

SEQ ID NO: 322 - DNA, 20 bp, Homo sapiens
gaacggagcctgcctggagt

SEQ ID NO: 323 - DNA, 21 bp, Homo sapiens
  misc_feature (11)..(12): nn=g or ggtag
actccaggcanngctccgttc

SEQ ID NO: 324 - DNA, 21 bp, Homo sapiens
  misc_feature (11)..(12): nn=t or tacct
gaacggagccnngcctggagt

SEQ ID NO: 325 - DNA, 23 bp, Homo sapiens
ttaatttttttttattattattt

SEQ ID NO: 326 - DNA, 23 bp, Homo sapiens
aaataataataaaaaaaaattaa

SEQ ID NO: 327 - DNA, 23 bp, Homo sapiens
  misc_feature (13)..(14): nn=a or ta
ttaattttttttnnttattattt

SEQ ID NO: 328 - DNA, 23 bp, Homo sapiens
  misc_feature (11)..(12): nn=a or aa
aaataataatnnaaaaaaattaa

SEQ ID NO: 329 - DNA, 28 bp, Homo sapiens
ttcctccttcctccttccctcgctaggt

SEQ ID NO: 330 - DNA, 28 bp, Homo sapiens
acctagcgagggaaggaggaaggaggaa

SEQ ID NO: 331 - DNA, 22 bp, Homo sapiens
  misc_feature (12)..(13): nn=c or tccttccc
ttcctccttccnntcgctaggt

SEQ ID NO: 332 - DNA, 22 bp, Homo sapiens
acctagcgagaggaaggaggaa

SEQ ID NO: 333 - DNA, 27 bp, Homo sapiens
ggggctggggctggggctgggtgcgtg

SEQ ID NO: 334 - DNA, 26 bp, Homo sapiens
cacgcacccgaccccgacccagcccc

SEQ ID NO: 335 - DNA, 22 bp, Homo sapiens
  misc_feature (12)..(13): nn=t or tggggct
ggggctggggcnngggtgcgtg

SEQ ID NO: 336 - DNA, 21 bp, Homo sapiens
  misc_feature (11)..(12): nn=a or gccccaa
cacgcacccgnncccagcccc

SEQ ID NO: 337 - DNA, 21 bp, Homo sapiens
gctcattcgagcagcggctct

SEQ ID NO: 338 - DNA, 20 bp, Homo sapiens
agagccgctgctcgaatgag

SEQ ID NO: 339 - DNA, 21 bp, Homo sapiens
  misc_feature (11)..(11): y=c or t
ctcattcgagyagcggctctt

SEQ ID NO: 340 - DNA, 20 bp, Homo sapiens
  misc_feature (10)..(10): r=a or g
agagccgctrctcgaatgag

SEQ ID NO: 341 - DNA, 19 bp, Homo sapiens
aaaattgctatcactatct

SEQ ID NO: 342 - DNA, 19 bp, Homo sapiens
agatagtgatagcaatttt

SEQ ID NO: 343 - DNA, 19 bp, Homo sapiens
  misc_feature (10)..(10): r=a or g
aaaattgctrtcactatct

SEQ ID NO: 344 - DNA, 19 bp, Homo sapiens
  misc_feature (10)..(10): y=c or t
agatagtgayagcaatttt

SEQ ID NO: 345 - DNA, 19 bp, Homo sapiens
ttcacttcaattacccatc

SEQ ID NO: 346 - DNA, 18 bp, Homo sapiens
atgggtaattgaagtgaa

SEQ ID NO: 347 - DNA, 18 bp, Homo sapiens
  misc_feature (9)..(9): r=a or g
tcacttcarttacccatc

SEQ ID NO: 348 - DNA, 19 bp, Homo sapiens
  misc_feature (10)..(10): y=c or t
gatgggtaaytgaagtgaa

SEQ ID NO: 349 - DNA, 20 bp, Homo sapiens
cttgaagggtctgaacctga

SEQ ID NO: 350 - DNA, 21 bp, Homo sapiens
tcaggttcagacccttcaaga

SEQ ID NO: 351 - DNA, 20 bp, Homo sapiens
  misc_feature (11)..(11): y=c or t
tcttgaagggyctgaacctg

SEQ ID NO: 352 - DNA, 21 bp, Homo sapiens
  misc_feature (11)..(11): r=a or g
tcaggttcagrcccttcaaga

SEQ ID NO: 353 - DNA, 17 bp, Homo sapiens
tcagcagttacattgca

SEQ ID NO: 354 - DNA, 17 bp, Homo sapiens
tgcaatgtaactgctga

SEQ ID NO: 355 - DNA, 17 bp, Homo sapiens
  misc_feature (8)..(8): y=c or t
cagcagtyacattgcac

SEQ ID NO: 356 - DNA, 17 bp, Homo sapiens
  misc_feature (9)..(9): r=a or g
tgcaatgtractgctga

SEQ ID NO: 357 - DNA, 19 bp, Homo sapiens
gacccatgcaagctagacc

SEQ ID NO: 358 - DNA, 19 bp, Homo sapiens
ggtctagcttgcatgggtc

SEQ ID NO: 359 - DNA, 19 bp, Homo sapiens
  misc_feature (10)..(10): r=a or g
gacccatgcragctagacc

SEQ ID NO: 360 - DNA, 19 bp, Homo sapiens
  misc_feature (10)..(10): y=c or t
ggtctagctygcatgggtc

SEQ ID NO: 361 - DNA, 19 bp, Homo sapiens
gagcacaacggtccagctg

SEQ ID NO: 362 - DNA, 19 bp, Homo sapiens
cagctggaccgttgtgctc

SEQ ID NO: 363 - DNA, 19 bp, Homo sapiens
  misc_feature (10)..(10): r=a or g
gagcacaacrgtccagctg

SEQ ID NO: 364 - DNA, 19 bp, Homo sapiens
  misc_feature (10)..(10): y=c or t
cagctggacygttgtgctc

SEQ ID NO: 365 - DNA, 19 bp, Homo sapiens
tgggcagacagtggccctg

SEQ ID NO: 366 - DNA, 19 bp, Homo sapiens
cagggccactgtctgccca

SEQ ID NO: 367 - DNA, 19 bp, Homo sapiens
  misc_feature (10)..(10): r=a or g
tgggcagacrgtggccctg

SEQ ID NO: 368 - DNA, 19 bp, Homo sapiens
  misc_feature (10)..(10): y=c or t
cagggccacygtctgccca

SEQ ID NO: 369 - DNA, 19 bp, Homo sapiens
ctcgtcctgatagatcttg

SEQ ID NO: 370 - DNA, 19 bp, Homo sapiens
caagatctatcaggacgag

SEQ ID NO: 371 - DNA, 19 bp, Homo sapiens
  misc_feature (10)..(10): r=a or g
ctcgtcctgrtagatcttg

SEQ ID NO: 372 - DNA, 19 bp, Homo sapiens
  misc_feature (10)..(10): y=c or t
caagatctaycaggacgag

SEQ ID NO: 373 - DNA, 19 bp, Homo sapiens
ggcttgaaggtgtaagaat

SEQ ID NO: 374 - DNA, 19 bp, Homo sapiens
attcttacaccttcaagcc

SEQ ID NO: 375 - DNA, 19 bp, Homo sapiens
  misc_feature (10)..(10): r=a or g
ggcttgaagrtgtaagaat

SEQ ID NO: 376 - DNA, 19 bp, Homo sapiens
  misc_feature (10)..(10): y=c or t
attcttacaycttcaagcc

SEQ ID NO: 377 - DNA, 20 bp, Homo sapiens
tattcctttacaaatttttg

SEQ ID NO: 378 - DNA, 20 bp, Homo sapiens
caaaaatttgtaaaggaata

SEQ ID NO: 379 - DNA, 20 bp, Homo sapiens
  misc_feature (12)..(12): w=a or t
tattcctttacwaatttttg

SEQ ID NO: 380 - DNA, 20 bp, Homo sapiens
  misc_feature (10)..(10): w=a or t
acaaaaattwgtaaaggaat

SEQ ID NO: 381 - DNA, 19 bp, Homo sapiens
actttgtctgatctcctgc

SEQ ID NO: 382 - DNA, 19 bp, Homo sapiens
gcaggagatcagacaaagt

SEQ ID NO: 383 - DNA, 19 bp, Homo sapiens
  misc_feature (10)..(10): r=a or g
actttgtctratctcctgc

SEQ ID NO: 384 - DNA, 19 bp, Homo sapiens
  misc_feature (10)..(10): y=c or t
gcaggagatyagacaaagt

SEQ ID NO: 385 - DNA, 22 bp, Homo sapiens
cttcaggtcggaatggatcttg

SEQ ID NO: 386 - DNA, 20 bp, Homo sapiens
caagatccattccgacctga

SEQ ID NO: 387 - DNA, 22 bp, Homo sapiens
  misc_feature (12)..(12): r=a or g
cttcaggtcggratggatcttg

SEQ ID NO: 388 - DNA, 22 bp, Homo sapiens
  misc_feature (11)..(11): y=c or t
caagatccatyccgacctgaag

SEQ ID NO: 389 - DNA, 20 bp, Homo sapiens
aaactgaacgataaaaggta

SEQ ID NO: 390 - DNA, 22 bp, Homo sapiens
taccttttatcgttcagtttaa

SEQ ID NO: 391 - DNA, 20 bp, Homo sapiens
  misc_feature (10)..(10): r=a or g
aaactgaacrataaaaggta

SEQ ID NO: 392 - DNA, 22 bp, Homo sapiens
  misc_feature (11)..(11): y=c or t
taccttttatygttcagtttaa

SEQ ID NO: 393 - DNA, 19 bp, Homo sapiens
ttctccttatgggtgttag

SEQ ID NO: 394 - DNA, 19 bp, Homo sapiens
ctaacacccataaggagaa

SEQ ID NO: 395 - DNA, 19 bp, Homo sapiens
  misc_feature (10)..(10): y=c or t
ttctccttaygggtgttag

SEQ ID NO: 396 - DNA, 19 bp, Homo sapiens
  misc_feature (10)..(10): r=a or g
ctaacacccrtaaggagaa

SEQ ID NO: 397 - DNA, 19 bp, Homo sapiens
aattttctcattacgggtg

SEQ ID NO: 398 - DNA, 19 bp, Homo sapiens
cacccgtaatgagaaaatt

SEQ ID NO: 399 - DNA, 19 bp, Homo sapiens
  misc_feature (10)..(10): m=a or c
aattttctcmttacgggtg

SEQ ID NO: 400 - DNA, 19 bp, Homo sapiens
  misc_feature (10)..(10): k=g or t
cacccgtaakgagaaaatt

SEQ ID NO: 401 - DNA, 19 bp, Homo sapiens
ttaattggctattttggac

SEQ ID NO: 402 - DNA, 19 bp, Homo sapiens
gtccaaaatagccaattaa

SEQ ID NO: 403 - DNA, 19 bp, Homo sapiens
  misc_feature (10)..(10): y=c or t
ttaattggcyattttggac

SEQ ID NO: 404 - DNA, 19 bp, Homo sapiens
  misc_feature (10)..(10): r=a or g
gtccaaaatrgccaattaa

SEQ ID NO: 405 - DNA, 19 bp, Homo sapiens
tctactggtatttgtctta

SEQ ID NO: 406 - DNA, 19 bp, Homo sapiens
taagacaaataccagtaga

SEQ ID NO: 407 - DNA, 19 bp, Homo sapiens
  misc_feature (10)..(10): r=a or g
tctactggtrtttgtctta

SEQ ID NO: 408 - DNA, 19 bp, Homo sapiens
  misc_feature (10)..(10): y=c or t
taagacaaayaccagtaga

SEQ ID NO: 409 - DNA, 19 bp, Homo sapiens
aatcattttatgtgccaca

SEQ ID NO: 410 - DNA, 19 bp, Homo sapiens
tgtggcacataaaatgatt

SEQ ID NO: 411 - DNA, 19 bp, Homo sapiens
  misc_feature (10)..(10): m=a or c
aatcattttmtgtgccaca

SEQ ID NO: 412 - DNA, 19 bp, Homo sapiens
  misc_feature (10)..(10): k=g or t
tgtggcacakaaaatgatt

SEQ ID NO: 413 - DNA, 19 bp, Homo sapiens
gaacattgcttatggagac

SEQ ID NO: 414 - DNA, 19 bp, Homo sapiens
gtctccataagcaatgttc

SEQ ID NO: 415 - DNA, 19 bp, Homo sapiens
  misc_feature (10)..(10): y=c or t
gaacattgcytatggagac

SEQ ID NO: 416 - DNA, 19 bp, Homo sapiens
  misc_feature (10)..(10): r=a or g
gtctccatargcaatgttc

SEQ ID NO: 417 - DNA, 16 bp, Homo sapiens
gaagagattgtgaggg

SEQ ID NO: 418 - DNA, 16 bp, Homo sapiens
ccctcacaatctcttc

SEQ ID NO: 419 - DNA, 17 bp, Homo sapiens
  misc_feature (9)..(9): y=c or t
gaagagatygtgagggc

SEQ ID NO: 420 - DNA, 16 bp, Homo sapiens
  misc_feature (8)..(8): r=a or g
ccctcacratctcttc

SEQ ID NO: 421 - DNA, 19 bp, Homo sapiens
tgaatgttccgtggctccg

SEQ ID NO: 422 - DNA, 19 bp, Homo sapiens
cggagccacggaacattca

SEQ ID NO: 423 - DNA, 19 bp, Homo sapiens
  misc_feature (10)..(10): m=a or c
tgaatgttcmgtggctccg

SEQ ID NO: 424 - DNA, 19 bp, Homo sapiens
  misc_feature (10)..(10): k=g or t
cggagccackgaacattca

SEQ ID NO: 425 - DNA, 19 bp, Homo sapiens
cgggtggtgacacaggaag

SEQ ID NO: 426 - DNA, 19 bp, Homo sapiens
cttcctgtgtcaccacccg

SEQ ID NO: 427 - DNA, 19 bp, Homo sapiens
  misc_feature (10)..(10): w=a or t
cgggtggtgwcacaggaag

SEQ ID NO: 428 - DNA, 19 bp, Homo sapiens
  misc_feature (10)..(10): w=a or t
cttcctgtgwcaccacccg

SEQ ID NO: 429 - DNA, 19 bp, Homo sapiens
aaaatactttggaaatttg

SEQ ID NO: 430 - DNA, 19 bp, Homo sapiens
caaatttccaaagtatttt

SEQ ID NO: 431 - DNA, 19 bp, Homo sapiens
  misc_feature (10)..(10): y=c or t
aaaatacttyggaaatttg

SEQ ID NO: 432 - DNA, 19 bp, Homo sapiens
  misc_feature (10)..(10): r=a or g
caaatttccraagtatttt

SEQ ID NO: 433 - DNA, 19 bp, Homo sapiens
atcattaaacgaaatgagt

SEQ ID NO: 434 - DNA, 19 bp, Homo sapiens
actcatttcgtttaatgat

SEQ ID NO: 435 - DNA, 19 bp, Homo sapiens
  misc_feature (10)..(10): y=c or t
atcattaaaygaaatgagt

SEQ ID NO: 436 - DNA, 19 bp, Homo sapiens
  misc_feature (10)..(10): r=a or g
actcatttcrtttaatgat

SEQ ID NO: 437 - DNA, 19 bp, Homo sapiens
gactaaagacacataaatg

SEQ ID NO: 438 - DNA, 19 bp, Homo sapiens
catttatgtgtctttagtc

SEQ ID NO: 439 - DNA, 19 bp, Homo sapiens
  misc_feature (10)..(10): s=c or g
gactaaagasacataaatg

SEQ ID NO: 440 - DNA, 19 bp, Homo sapiens
  misc_feature (10)..(10): s=c or g
catttatgtstctttagtc

SEQ ID NO: 441 - DNA, 22 bp, Homo sapiens
gacataaatgttatgtttgttt

SEQ ID NO: 442 - DNA, 23 bp, Homo sapiens
aaacaaacataacatttatgtct

SEQ ID NO: 443 - DNA, 21 bp, Homo sapiens
  misc_feature (12)..(12): k=g or t
agacataaatgktatgtttgt

SEQ ID NO: 444 - DNA, 22 bp, Homo sapiens
  misc_feature (12)..(12): m=a or c
aaacaaacatamcatttatgtc

SEQ ID NO: 445 - DNA, 19 bp, Homo sapiens
gatacagggctcttcatga

SEQ ID NO: 446 - DNA, 19 bp, Homo sapiens
tcatgaagagccctgtatc

SEQ ID NO: 447 - DNA, 19 bp, Homo sapiens
  misc_feature (10)..(10): y=c or t
gatacagggytcttcatga

SEQ ID NO: 448 - DNA, 19 bp, Homo sapiens
  misc_feature (10)..(10): r=a or g
tcatgaagarccctgtatc

SEQ ID NO: 449 - DNA, 21 bp, Homo sapiens
gatacagggtccttcatgaat

SEQ ID NO: 450 - DNA, 21 bp, Homo sapiens
attcatgaaggaccctgtatc

SEQ ID NO: 451 - DNA, 21 bp, Homo sapiens
  misc_feature (11)..(11): y=c or t
gatacagggtycttcatgaat

SEQ ID NO: 452 - DNA, 21 bp, Homo sapiens
  misc_feature (11)..(11): r=a or g
attcatgaagraccctgtatc

SEQ ID NO: 453 - DNA, 19 bp, Homo sapiens
gtgcacgatattggggagc

SEQ ID NO: 454 - DNA, 19 bp, Homo sapiens
gctccccaatatcgtgcac

SEQ ID NO: 455 - DNA, 19 bp, Homo sapiens
  misc_feature (10)..(10): r=a or g
gtgcacgatrttggggagc

SEQ ID NO: 456 - DNA, 19 bp, Homo sapiens
  misc_feature (10)..(10): y=c or t
gctccccaayatcgtgcac

SEQ ID NO: 457 - DNA, 21 bp, Homo sapiens
taagcagcaataatgtcgtgt

SEQ ID NO: 458 - DNA, 21 bp, Homo sapiens
acacgacattattgctgctta

SEQ ID NO: 459 - DNA, 21 bp, Homo sapiens
  misc_feature (11)..(11): y=c or t
taagcagcaayaatgtcgtgt

SEQ ID NO: 460 - DNA, 21 bp, Homo sapiens
  misc_feature (11)..(11): r=a or g
acacgacattrttgctgctta

SEQ ID NO: 461 - DNA, 19 bp, Homo sapiens
caacaatgttgtgtgcatc

SEQ ID NO: 462 - DNA, 19 bp, Homo sapiens
gatgcacacaacattgttg

SEQ ID NO: 463 - DNA, 19 bp, Homo sapiens
  misc_feature (10)..(10): y=c or t
caacaatgtygtgtgcatc

SEQ ID NO: 464 - DNA, 19 bp, Homo sapiens
  misc_feature (10)..(10): r=a or g
gatgcacacracattgttg

SEQ ID NO: 465 - DNA, 19 bp, Homo sapiens
cattaaatggaggactggg

SEQ ID NO: 466 - DNA, 19 bp, Homo sapiens
cccagtcctccatttaatg

SEQ ID NO: 467 - DNA, 19 bp, Homo sapiens
  misc_feature (10)..(10): r=a or g
cattaaatgraggactggg

SEQ ID NO: 468 - DNA, 19 bp, Homo sapiens
  misc_feature (10)..(10): y=c or t
cccagtcctycatttaatg

SEQ ID NO: 469 - DNA, 19 bp, Homo sapiens
tcctctgaggatgtgcagt

SEQ ID NO: 470 - DNA, 19 bp, Homo sapiens
actgcacatcctcagagga

SEQ ID NO: 471 - DNA, 19 bp, Homo sapiens
  misc_feature (10)..(10): r=a or g
tcctctgagratgtgcagt

SEQ ID NO: 472 - DNA, 19 bp, Homo sapiens
  misc_feature (10)..(10): y=c or t
actgcacatyctcagagga

SEQ ID NO: 473 - DNA, 19 bp, Homo sapiens
aacttacttgtatctttga

SEQ ID NO: 474 - DNA, 19 bp, Homo sapiens
tcaaagatacaagtaagtt

SEQ ID NO: 475 - DNA, 19 bp, Homo sapiens
  misc_feature (10)..(10): r=a or g
aacttacttrtatctttga

SEQ ID NO: 476 - DNA, 19 bp, Homo sapiens
  misc_feature (10)..(10): y=c or t
tcaaagatayaagtaagtt

SEQ ID NO: 477 - DNA, 19 bp, Homo sapiens
agaaatagtttaatcaaca

SEQ ID NO: 478 - DNA, 19 bp, Homo sapiens
tgttgattaaactatttct

SEQ ID NO: 479 - DNA, 19 bp, Homo sapiens
  misc_feature (10)..(10): w=a or t
agaaatagtwtaatcaaca

SEQ ID NO: 480 - DNA, 19 bp, Homo sapiens
  misc_feature (10)..(10): w=a or t
tgttgattawactatttct

SEQ ID NO: 481 - DNA, 19 bp, Homo sapiens
tagggagggcttaaggcca

SEQ ID NO: 482 - DNA, 19 bp, Homo sapiens
tggccttaagccctcccta

SEQ ID NO: 483 - DNA, 19 bp, Homo sapiens
  misc_feature (10)..(10): y=c or t
tagggagggyttaaggcca

SEQ ID NO: 484 - DNA, 19 bp, Homo sapiens
  misc_feature (10)..(10): r=a or g
tggccttaarccctcccta

SEQ ID NO: 485 - DNA, 19 bp, Homo sapiens
gaaaggtgaaataaagcaa

SEQ ID NO: 486 - DNA, 19 bp, Homo sapiens
ttgctttatttcacctttc

SEQ ID NO: 487 - DNA, 19 bp, Homo sapiens
  misc_feature (10)..(10): r=a or g
gaaaggtgarataaagcaa

SEQ ID NO: 488 - DNA, 19 bp, Homo sapiens
  misc_feature (10)..(10): y=c or t
ttgctttatytcacctttc

SEQ ID NO: 489 - DNA, 19 bp, Homo sapiens
catttaccctagatggacc

SEQ ID NO: 490 - DNA, 19 bp, Homo sapiens
ggtccatctagggtaaatg

SEQ ID NO: 491 - DNA, 19 bp, Homo sapiens
  misc_feature (10)..(10): y=c or t
catttacccyagatggacc

SEQ ID NO: 492 - DNA, 19 bp, Homo sapiens
  misc_feature (10)..(10): r=a or g
ggtccatctrgggtaaatg

SEQ ID NO: 493 - DNA, 19 bp, Homo sapiens
atatggaagaaaattacaa

SEQ ID NO: 494 - DNA, 19 bp, Homo sapiens
ttgtaattttcttccatat

SEQ ID NO: 495 - DNA, 19 bp, Homo sapiens
  misc_feature (10)..(10): r=a or g
atatggaagraaattacaa

SEQ ID NO: 496 - DNA, 19 bp, Homo sapiens
  misc_feature (10)..(10): y=c or t
ttgtaatttycttccatat

SEQ ID NO: 497 - DNA, 19 bp, Homo sapiens
aacacgggcgttgatctga

SEQ ID NO: 498 - DNA, 19 bp, Homo sapiens
tcagatcaacgcccgtgtt

SEQ ID NO: 499 - DNA, 19 bp, Homo sapiens
  misc_feature (10)..(10): r=a or g
aacacgggcrttgatctga

SEQ ID NO: 500 - DNA, 19 bp, Homo sapiens
  misc_feature (10)..(10): y=c or t
tcagatcaaygcccgtgtt

SEQ ID NO: 501 - DNA, 19 bp, Homo sapiens
tgtattaaacgcgaatccc

SEQ ID NO: 502 - DNA, 19 bp, Homo sapiens
gggattcgcgtttaataca

SEQ ID NO: 503 - DNA, 19 bp, Homo sapiens
  misc_feature (10)..(10): y=c or t
tgtattaaaygcgaatccc

SEQ ID NO: 504 - DNA, 19 bp, Homo sapiens
  misc_feature (10)..(10): r=a or g
gggattcgcrtttaataca

SEQ ID NO: 505 - DNA, 19 bp, Homo sapiens
ttgaaagacatgtctacat

SEQ ID NO: 506 - DNA, 19 bp, Homo sapiens
atgtagacatgtctttcaa

SEQ ID NO: 507 - DNA, 19 bp, Homo sapiens
  misc_feature (10)..(10): r=a or g
ttgaaagacrtgtctacat

SEQ ID NO: 508 - DNA, 19 bp, Homo sapiens
  misc_feature (10)..(10): y=c or t
atgtagacaygtctttcaa

SEQ ID NO: 509 - DNA, 19 bp, Homo sapiens
cgtgtctacttaagttgaa

SEQ ID NO: 510 - DNA, 19 bp, Homo sapiens
ttcaacttaagtagacacg

SEQ ID NO: 511 - DNA, 19 bp, Homo sapiens
  misc_feature (10)..(10): w=a or t
cgtgtctacwtaagttgaa

SEQ ID NO: 512 - DNA, 19 bp, Homo sapiens
  misc_feature (10)..(10): w=a or t
ttcaacttawgtagacacg

SEQ ID NO: 513 - DNA, 19 bp, Homo sapiens
atgtccccagtgattcagc

SEQ ID NO: 514 - DNA, 19 bp, Homo sapiens
gctgaatcactggggacat

SEQ ID NO: 515 - DNA, 19 bp, Homo sapiens
  misc_feature (10)..(10): r=a or g
atgtccccartgattcagc

SEQ ID NO: 516 - DNA, 19 bp, Homo sapiens
  misc_feature (10)..(10): y=c or t
gctgaatcaytggggacat

SEQ ID NO: 517 - DNA, 19 bp, Homo sapiens
ccgggccggaagcagtcat

SEQ ID NO: 518 - DNA, 19 bp, Homo sapiens
atgactgcttccggcccgg

SEQ ID NO: 519 - DNA, 19 bp, Homo sapiens
  misc_feature (10)..(10): r=a or g
ccgggccggragcagtcat

SEQ ID NO: 520 - DNA, 19 bp, Homo sapiens
  misc_feature (10)..(10): y=c or t
atgactgctyccggcccgg

SEQ ID NO: 521 - DNA, 19 bp, Homo sapiens
gaggcgggcagatcacgag

SEQ ID NO: 522 - DNA, 19 bp, Homo sapiens
ctcgtgatctgcccgcctc

SEQ ID NO: 523 - DNA, 19 bp, Homo sapiens
  misc_feature (10)..(10): r=a or g
gaggcgggcrgatcacgag

SEQ ID NO: 524 - DNA, 19 bp, Homo sapiens
  misc_feature (10)..(10): y=c or t
ctcgtgatcygcccgcctc

SEQ ID NO: 525 - DNA, 19 bp, Homo sapiens
ggagaatggcgtgaacccg

SEQ ID NO: 526 - DNA, 19 bp, Homo sapiens
cgggttcacgccattctcc

SEQ ID NO: 527 - DNA, 19 bp, Homo sapiens
  misc_feature (10)..(10): y=c or t
ggagaatggygtgaacccg

SEQ ID NO: 528 - DNA, 19 bp, Homo sapiens
  misc_feature (10)..(10): r=a or g
cgggttcacrccattctcc

SEQ ID NO: 529 - DNA, 23 bp, Homo sapiens
acttttccgttgccgcggcaact

SEQ ID NO: 530 - DNA, 23 bp, Homo sapiens
ttgccgcggcaacggaaaagttc

SEQ ID NO: 531 - DNA, 23 bp, Homo sapiens
  misc_feature (11)..(11): k=g or t
acttttccgtkgccgcggcaact

SEQ ID NO: 532 - DNA, 23 bp, Homo sapiens
  misc_feature (11)..(11): m=a or c
ttgccgcggcmacggaaaagttc

SEQ ID NO: 533 - DNA, 21 bp, Homo sapiens
ctcgggaagggctccatcaga

SEQ ID NO: 534 - DNA, 21 bp, Homo sapiens
tctgatggagcccttcccgag

SEQ ID NO: 535 - DNA, 21 bp, Homo sapiens
  misc_feature (11)..(11): r=a or g
ctcgggaaggrctccatcaga

SEQ ID NO: 536 - DNA, 21 bp, Homo sapiens
  misc_feature (11)..(11): y=c or t
tctgatggagyccttcccgag

SEQ ID NO: 537 - skipped

SEQ ID NO: 538 - protein, 11 aa, Homo sapiens
PLVLGRLLCVL

SEQ ID NO: 539 - protein, 11 aa, Homo sapiens
  MISC_FEATURE (6)..(6): X=L or R
PLVLGXLLCVL

SEQ ID NO: 540 - protein, 11 aa, Homo sapiens
LYIRDRAFYTL

SEQ ID NO: 541 - protein, 11 aa, Homo sapiens
  MISC_FEATURE (6)..(6): X=G or R
LYIRDXAFYTL

SEQ ID NO: 542 - protein, 11 aa, Homo sapiens
KKIKKDCYAFC

SEQ ID NO: 543 - protein, 7 aa, Homo sapiens
  MISC_FEATURE (7)..(7): X=CYAFC or wildtype
KKIKKDX

SEQ ID NO: 544 - protein, 11 aa, Homo sapiens
VMLTDPFPSLQ

SEQ ID NO: 545 - protein, 7 aa, Homo sapiens
  MISC_FEATURE (7)..(7): X=FPSLQ or wildtype
VMLTDPX

SEQ ID NO: 546 - protein, 11 aa, Homo sapiens
LSLPTVFLHAL

SEQ ID NO: 547 - protein, 8 aa, Homo sapiens
  MISC_FEATURE (8)..(8): X=LHAL or wildtype
LSLPTVFX

SEQ ID NO: 548 - protein, 11 aa, Homo sapiens
FFLHAQPCSLE

SEQ ID NO: 549 - protein, 11 aa, Homo sapiens
  MISC_FEATURE (6)..(6): X=L or Q
FFLHAXPCSLE

SEQ ID NO: 550 - protein, 11 aa, Homo sapiens
LHALPRSLEFE

SEQ ID NO: 551 - protein, 11 aa, Homo sapiens
  MISC_FEATURE (6)..(6): X=C or R
LHALPXSLEFE

SEQ ID NO: 552 - protein, 11 aa, Homo sapiens
MTFLQWVKNML

SEQ ID NO: 553 - protein, 11 aa, Homo sapiens
  MISC_FEATURE (6)..(6): X=R or W
MTFLQXVKNML

SEQ ID NO: 554 - protein, 11 aa, Homo sapiens
DVVYSQYATLA

SEQ ID NO: 555 - protein, 11 aa, Homo sapiens
  MISC_FEATURE (6)..(6): X=P or Q
DVVYSXYATLA

SEQ ID NO: 556 - protein, 11 aa, Homo sapiens
NMVFVRGINCL

SEQ ID NO: 557 - protein, 11 aa, Homo sapiens
  MISC_FEATURE (6)..(6): X=G or R
NMVFVXGINCL

SEQ ID NO: 558 - protein, 11 aa, Homo sapiens
SQEFEVYINAS

SEQ ID NO: 559 - protein, 11 aa, Homo sapiens
  MISC_FEATURE (6)..(6): X=A or V
SQEFEXYINAS

SEQ ID NO: 560 - protein, 10 aa, Homo sapiens
QEFEAWRTWN

SEQ ID NO: 561 - protein, 11 aa, Homo sapiens
  MISC_FEATURE (6)..(11): XINASG=WRTWN or YINASG
QEFEAXINASG

SEQ ID NO: 562 - protein, 11 aa, Homo sapiens
VVFSLESMVSE

SEQ ID NO: 563 - protein, 11 aa, Homo sapiens
  MISC_FEATURE (6)..(6): X=G or E
VVFSLXSMVSE

SEQ ID NO: 564 - protein, 11 aa, Homo sapiens
LGKIPRTVLWR

SEQ ID NO: 565 - protein, 11 aa, Homo sapiens
  MISC_FEATURE (6)..(6): X=Q or R
LGKIPXTVLWR

SEQ ID NO: 566 - protein, 11 aa, Homo sapiens
VKWLPRNDLLG

SEQ ID NO: 567 - protein, 11 aa, Homo sapiens
  MISC_FEATURE (6)..(6): X=Q or R
VKWLPXNDLLG

SEQ ID NO: 568 - protein, 11 aa, Homo sapiens
GHPMTGAFITH

SEQ ID NO: 569 - protein, 11 aa, Homo sapiens
  MISC_FEATURE (6)..(6): X=G or R
GHPMTXAFITH

SEQ ID NO: 570 - protein, 11 aa, Homo sapiens
HPMTRTFITHA

SEQ ID NO: 571 - protein, 11 aa, Homo sapiens
  MISC_FEATURE (6)..(6): X=A or T
HPMTRXFITHA

SEQ ID NO: 572 - protein, 11 aa, Homo sapiens
ICNGVRMVMMP

SEQ ID NO: 573 - protein, 11 aa, Homo sapiens
  MISC_FEATURE (6)..(6): X=P or R
ICNGVXMVMMP

SEQ ID NO: 574 - protein, 11 aa, Homo sapiens
ITHAGFHGVYE

SEQ ID NO: 575 - protein, 11 aa, Homo sapiens
  MISC_FEATURE (6)..(6): X=S or F
ITHAGXHGVYE

SEQ ID NO: 576 - protein, 11 aa, Homo sapiens
HGVYERICNGV

SEQ ID NO: 577 - protein, 11 aa, Homo sapiens
  MISC_FEATURE (6)..(6): X=S or R
HGVYEXICNGV

SEQ ID NO: 578 - protein, 11 aa, Homo sapiens
DQMDNPKRMET

SEQ ID NO: 579 - protein, 11 aa, Homo sapiens
  MISC_FEATURE (6)..(6): X=A or P
DQMDNXKRMET

SEQ ID NO: 580 - protein, 9 aa, Homo sapiens
MDNAKRHGD

SEQ ID NO: 581 - protein, 6 aa, Homo sapiens
  MISC_FEATURE (6)..(6): X=RHGD or wildtype
MDNAKX

SEQ ID NO: 582 - protein, 11 aa, Homo sapiens
LENALEAVIND

SEQ ID NO: 583 - protein, 11 aa, Homo sapiens
  MISC_FEATURE (6)..(6): X=E or K
LENALXAVIND

SEQ ID NO: 584 - protein, 11 aa, Homo sapiens
LTWYQDHSLDV

SEQ ID NO: 585 - protein, 11 aa, Homo sapiens
  MISC_FEATURE (6)..(6): X=D or Y
LTWYQXHSLDV

SEQ ID NO: 586 - protein, 11 aa, Homo sapiens
WYQYHFLDVIG

SEQ ID NO: 587 - protein, 11 aa, Homo sapiens
  MISC_FEATURE (6)..(6): X=F or S
WYQYHXLDVIG

SEQ ID NO: 588 - protein, 5 aa, Homo sapiens
LGAIQ

SEQ ID NO: 589 - protein, 5 aa, Homo sapiens
LGAIQ

SEQ ID NO: 590 - protein, 5 aa, Homo sapiens
VGGIN

SEQ ID NO: 591 - protein, 5 aa, Homo sapiens
VGGIN

SEQ ID NO: 592 - protein, 5 aa, Homo sapiens
LGKIP

SEQ ID NO: 593 - protein, 5 aa, Homo sapiens
LGKIP

SEQ ID NO: 594 - protein, 5 aa, Homo sapiens
PQTVL

SEQ ID NO: 595 - protein, 5 aa, Homo sapiens
PQTVL

SEQ ID NO: 596 - protein, 5 aa, Homo sapiens
VKWLP

SEQ ID NO: 597 - protein, 5 aa, Homo sapiens
VKWLP

SEQ ID NO: 598 - protein, 5 aa, Homo sapiens
NDKSY

SEQ ID NO: 599 - protein, 5 aa, Homo sapiens
NDKSY

SEQ ID NO: 600 - protein, 11 aa, Homo sapiens
YFLMSCFFKAI

SEQ ID NO: 601 - protein, 11 aa, Homo sapiens
  MISC_FEATURE (6)..(6): X=C or F
YFLMSXFFKAI

SEQ ID NO: 602 - protein, 11 aa, Homo sapiens
SVDAQSFMDLA

SEQ ID NO: 603 - protein, 11 aa, Homo sapiens
  MISC_FEATURE (6)..(6): X=R or S
SVDAQXFMDLA

SEQ ID NO: 604 - protein, 11 aa, Homo sapiens
QNDSLQENILF

SEQ ID NO: 605 - protein, 11 aa, Homo sapiens
  MISC_FEATURE (6)..(6): X=Q or R
QNDSLXENILF

SEQ ID NO: 606 - protein, 11 aa, Homo sapiens
FFKLNDKSEKD

SEQ ID NO: 607 - protein, 11 aa, Homo sapiens
  MISC_FEATURE (6)..(6): X=D or N
FFKLNXKSEKD

SEQ ID NO: 608 - protein, 11 aa, Homo sapiens
INDTGLFMNLE

SEQ ID NO: 609 - protein, 11 aa, Homo sapiens
  MISC_FEATURE (6)..(6): X=F or L
INDTGXFMNLE

SEQ ID NO: 610 - protein, 11 aa, Homo sapiens
FDVHDIGELNT

SEQ ID NO: 611 - protein, 11 aa, Homo sapiens
  MISC_FEATURE (6)..(6): X=I or V
FDVHDXGELNT

SEQ ID NO: 612 - protein, 11 aa, Homo sapiens
RNVHFNYPSRK

SEQ ID NO: 613 - protein, 11 aa, Homo sapiens
  MISC_FEATURE (6)..(6): X=N or S
RNVHFXYPSRK

SEQ ID NO: 614 - protein, 11 aa, Homo sapiens
VKILKGLNLKV

SEQ ID NO: 615 - protein, 11 aa, Homo sapiens
  MISC_FEATURE (6)..(6): X=G
VKILKXLNLKV

SEQ ID NO: 616 - protein, 11 aa, Homo sapiens
CGKSTTVQLMQ

SEQ ID NO: 617 - protein, 11 aa, Homo sapiens
  MISC_FEATURE (6)..(6): X=T
CGKSTXVQLMQ

SEQ ID NO: 618 - protein, 11 aa, Homo sapiens
KELEGSGKIAT

SEQ ID NO: 619 - protein, 11 aa, Homo sapiens
  MISC_FEATURE (6)..(6): X=A or S
KELEGXGKIAT

SEQ ID NO: 620 - protein, 11 aa, Homo sapiens
FAPDYTKAKIS

SEQ ID NO: 621 - protein, 11 aa, Homo sapiens
  MISC_FEATURE (6)..(6): X=A or T
FAPDYXKAKIS

SEQ ID NO: 622 - protein, 11 aa, Homo sapiens
PDYAKTKISAA

SEQ ID NO: 623 - protein, 11 aa, Homo sapiens
  MISC_FEATURE (6)..(6): X=A or T
PDYAKXKISAA

SEQ ID NO: 624 - protein, 11 aa, Homo sapiens
KRLNVPWLRAH

SEQ ID NO: 625 - protein, 11 aa, Homo sapiens
  MISC_FEATURE (6)..(6): X=P or Q
KRLNVXWLRAH

SEQ ID NO: 626 - protein, 11 aa, Homo sapiens
IAENIAYGDNS

SEQ ID NO: 627 - protein, 11 aa, Homo sapiens
  MISC_FEATURE (6)..(6): X=A
IAENIXYGDNS

SEQ ID NO: 628 - protein, 11 aa, Homo sapiens
NSRVVTQEEIV

SEQ ID NO: 629 - protein, 11 aa, Homo sapiens
  MISC_FEATURE (6)..(6): X=S or T
NSRVVXQEEIV

SEQ ID NO: 630 - protein, 11 aa, Homo sapiens
VSQEEIVRAAK

SEQ ID NO: 631 - protein, 11 aa, Homo sapiens
  MISC_FEATURE (6)..(6): X=I
VSQEEXVRAAK

SEQ ID NO: 632 - protein, 11 aa, Homo sapiens
PGLFRCRGNHP

SEQ ID NO: 633 - protein, 11 aa, Homo sapiens
  MISC_FEATURE (6)..(6): X=C or G
PGLFRXRGNHP

SEQ ID NO: 634 - protein, 11 aa, Homo sapiens
DFLGKGSIRYY

SEQ ID NO: 635 - protein, 11 aa, Homo sapiens
  MISC_FEATURE (6)..(6): X=D or G
DFLGKXSIRYY

SEQ ID NO: 636 - DNA, 21 bp, Homo sapiens
actagaaggttctgggaaggt

SEQ ID NO: 637 - DNA, 21 bp, Homo sapiens
accttcccagaaccttctagt

SEQ ID NO: 638 - DNA, 21 bp, Homo sapiens
  misc_feature (11)..(11): k=g or t
actagaaggtkctgggaaggt

SEQ ID NO: 639 - DNA, 21 bp, Homo sapiens
  misc_feature (11)..(11): m=a or c
accttcccagmaccttctagt

SEQ ID NO: 640 - DNA, 21 bp, Homo sapiens
tcctgactataccaaagccaa

SEQ ID NO: 641 - DNA, 21 bp, Homo sapiens
ttggctttggtatagtcagga

SEQ ID NO: 642 - DNA, 21 bp, Homo sapiens
  misc_feature (11)..(11): r=a or g
tcctgactatrccaaagccaa

SEQ ID NO: 643 - DNA, 21 bp, Homo sapiens
  misc_feature (11)..(11): y=c or t
ttggctttggyatagtcagga

SEQ ID NO: 644 - DNA, 21 bp, Homo sapiens
tgccttcatcgagtcactgcc

SEQ ID NO: 645 - DNA, 21 bp, Homo sapiens
tcactggcgctttgttccagc

SEQ ID NO: 646 - DNA, 20 bp, Homo sapiens
tctccaaggagctggacaca

SEQ ID NO: 647 - DNA, 20 bp, Homo sapiens
cgtggtgacctgcaatgagt

SEQ ID NO: 648 - DNA, 20 bp, Homo sapiens
gatgatgcccttgtttggtg

SEQ ID NO: 649 - DNA, 27 bp, Homo sapiens
tgttttcaagtttggaaatgactaggg

SEQ ID NO: 650 - DNA, 21 bp, Homo sapiens
aacctctggcaggagcaaagg

SEQ ID NO: 651 - DNA, 27 bp, Homo sapiens
tgttttcaagtttggaaatgactaggg

SEQ ID NO: 652 - DNA, 24 bp, Homo sapiens
tcagcctggtgctcctctatctat

SEQ ID NO: 653 - DNA, 27 bp, Homo sapiens
aagcccttatggtaggacaaaatattt

SEQ ID NO: 654 - DNA, 25 bp, Homo sapiens
ttgttgggaaatgttttgtcctatc

SEQ ID NO: 655 - DNA, 24 bp, Homo sapiens
acagggagttgaccttcatacgtt

SEQ ID NO: 656 - DNA, 20 bp, Homo sapiens
gctggttcagaaggccaaac

SEQ ID NO: 657 - DNA, 20 bp, Homo sapiens
gggccagacccagtctgata

SEQ ID NO: 658 - DNA, 164702 bp, Homo sapiens
gtacagatggggttttggtgtggatgtcgtttctgtttgttagttttccttctaacagtcaggaccctcggctgcaggtctgttggggtttgctggaggtctacttcagaccctgtttgcctgggtatcagcagaggctgcagaacagtgaatattgcagaacagcaaatgttgctgcctcatcattcctctagaagcttcgtctcagaggggtacccagccgtgtggggtgtcagtctgcccctacttgggggtgcctcccagttaggctactcggaggtcagggacccacttgaggaggcagagtgtccattctcagatctcaaactctgtgctgggagaaccactactctcttcaaagctgtcagacagggacatttaagtctgcagaagtttctgctgccttttgttcagctatgccctgcccccagaggtggaatctacagaggcaggcaggcctccttgagctgaggtggactctacccagttcgagcttcccggcagctttgtttatctactcaagcctcagtaatggtgggcgcccctcccccagcctcgctgccaccttgcagatcgatctcagactgctgtgctagcaacaagcaaggctctgtgggcgtgggaccctccgagccaggtgccagatataatctctgtttatatataatataaactgtgtgccgtttgctaagacctttggaaaagcgtagtattaggatgggagtgacccgattttccaggtgccatctgtcacagattcccttggctaggaaagggaattccctgaccccttgcgcttcccaggtgaggtgatgcctcaccttgcttcggctctcactcagtgggctgcacccactgtcctgcacccctgtccgacaagccccagtgagatgaacccagtacctaagttggaaatgcagaaatcaaccgtcttctgtgtcgctcaagctgggagctgtagactggagctgttcctattcagccatcttggaaccctcccccgtttaattttttatagtaagtgcctgggctagattgtcacagatcttgattgtgattccagagccagtaccttatcacagtactatgaagataggtaatcccatcctcatacacacacgtgctacatcacatggcccacgtatggtgattgctgcagttcaggtttctctggaaccaggctctgagatgaagatctgcaggcaggatttttactggtgagggctcctgagcacaaccccaaggggagtgcacaaaacaggacaagggagtcagagaagttgggccgtggtgctgtcacaacaaaagcctcagccaacctttcaggtcctacacattgtcctgaactgagtcaagagcctttgtgttcccaagtcgaccactcattgaatgcacatgggcctggggcaaacagtataatcttgggtgaggcagctctgattagctgaaggcagaggacaatccccaaaaggaaggacctaagtgagccatcagctgtcaacactccaagaagctggagaaagagtgcttcagtcaggaaagggcaggggatctgagtggcacatcacagctctaccacagtgactgtgtcttctgatccccaactcaggatgcggccctgtgaacctgtttatggattctgagttacagattatatcattttaaggccaaataagtcaaagaaatcagactgaggggagaaaagaacttcaaatactgctttggtttatgtgtagggcaagaggagtatttctctctcctcttagtctctctctttgcctctttctgtctttgtctctgcctctgtctttctcatttacattctctgtgatacacacatactaatatgatgacactaaataaaacatgaaacccctgatagcaaggaggggaaacagaaaaggagagacaataatttgaaatactggtaatggatagttattatccaggtggatattgggattttggaataattctatcaataatgtacatgtcctctaaatgaaggacatttatgttatgttgggtgaatagaaccctgttagtagttctgcatcctcaatcttttttttatcctcaatctttcctcataggtcttatatattaaaagatataattgcctcaggatggttcttgcctaaaacaaatagcaaagatacttatactactgattgtgaagaggaagttgttttatttttccattttaaaataagaacaataaacatgtttttaaagtttaagatcaaaattatttattatttaatgttatctacttatccattatgcagatgcttttaaaaagctagaaagtcaacaactggcaagaatggttttattagggcatgaattagaaataaatccccaagggaaaatgaattcagcttatattatgagaaaatgtgaagagtcattaatccatattatgctgccttgctattctattaactaaggcaaaaacaaattctctagtcaccattctcattttcatgagtagcaaggtattagtgcagtagctagggttcaaaagttaataataaacctgaatcaagaataatttcaaaagtacccagacaacaaaaggcagtggagagtgaaaattcaaatgtagcaggacattatctgattagaaatctgttgtcattgtcctccaccaaaatggcccacgaattgctgaggtaaagtctgcgatctctatgatgggattgaatttgtacccaaagttagtagctcagcatttcctttcctctttctttttaaaaccccacattataaaagggcacacagcaacacattttactgttaaatatgatctgagcctgttggaatactgcccatgcaaaagtgtcaccctggcaactcacccatgccttccacttcccaataggagttttcccatacaaccctccccttgtagaatgctgttctctaaccacagggtacaaggaaggcagtctccagtgctgttccaaactctgaatacttctaagtggcaactccaaaactaacataaattgcatgcattgctttgcttgcacaatgacactcactttggaatccaagcagaaagcagccacctaatatggttgcattctgtcctttacccatggtaagatagttcagaagaagaccaccaccaagtcaggtaacagtggtgaaagctgacctcccctttcgcagccatcataccatcttgtgttcacagtctgcaatagtttccatatctattcatccctgctcatacggttgttctgcccaatgcagccaagcgatacacacggcaaacacttagcaaatgccaatgtctccccacagcactcaccccttatccacaacatgctatttccactaccagttccacaaaccaagggtctcacgttttagagacatcatattagtgtgtgtctatcatgcagcgaatatgagtgagacagaaaaagattcatagagacagagagaaaatagaggcaaaaaagattgaaacagggagaaatattctttgtgttctgcgcataaatgagtagaaacttttgttactggcagctttcgggatgagtgaatcatgttttgtacacgcactctgataatttacagcccactggtttcacagtaaagactgaccattctgtggacttcagagaacaattcattgtcttcaagaccacctacaactcgcgtgtatgtgccgtcattccaaattatactaatgcagcgtttccataaattcatcctctacacataaaactcacagtagattgcaatgtaattgaccaaatcagaaatatcttgtgctttctggatgactgtaattaaccacaatttattgtatatttcaaaatagctagaagaaagatttctaatgttcccaacacaaagaaatcataaatgtttgaggtgatggatatacccaattaatctggtttaatcattacacagtgtatgcatgtatcaaagatcacctgtaaatatgactaatttgtatatgaaatatgtataatcattatgtatgaatttaaaaatgaacaaaaaaggtaatatcctgtgcctaaaagtgttggttttaaagtcactgatgtcttttttaactagaatttaaacacaggtggtttgattctgttccaatctttcatttcactggtaaaaccagtctagagaaataaaggctgccaaaaacaaaatctatgttaaaaattaaaaactataaaatttaaaaataacaaagccttaatcagagcctcaagtattaaaagagaatctgattgttgcatctagattgattaaccaaagcaagtgtcattggtgtgaactgatttacttaattcaattccctattttaagacatatagataactttacagctcaataaagatttagaataagagaaaaaaaagatgaggtggaaacggcagagtgagattcaggagaccaggactctggttccagctgttagtgttcagtaagttacttaattttgcctcaaattatttttcttgtgtatgaaaaagtgacagattcgtggacctttaaagttcctgaaaagatggtagtgaactacagagagtaaaaatcgagcattttgtagctttccaatgggtattaaggaaaaaaatcagtaagctaattaagatcacagtaatcaaataaaattcactcaaaatagtactattgtaagtattatttgaagttgaaatttttaccccagacattccctcaaagaaggctgtgagaatgaatttcagcagtctgacttgggtggacttgctctcaaacagtgcaggctctgttataacaggcctcaaccatgtcctgggtggatgctgagaagacccaaagggaggggccctaacaccaccccactgaagaatgcaagaaagaccctctcagtctcccataagcaatgctgaaacactgggcagagcaatgaaagtgagaatttgacaaaaaatcatgattgatactgaaaaagaatgacatttgagaaagcaaagctcctttcgtaaataattgctgtagctattgtgaattaaaatggagaatagcactggcttgttactgtccttaacttcagggttcacactgtttgttaaagactgctttgaatttccttttatcaaactggaaaggtcaccgtatttgtctctaggaagaaaaatcctaatttattatgccaagaaaataagaagaaatactacagatacaaatgaaacagcagataatgtcagaataaaatgaaaatagagaatgtggtaagttgtgctttcagtaaataaatgaataatattgaaggcttaaatacaaaatcaaatacataattaagaaaatatttttaaccattgcctataactcccaagtgaatgtttctagttctgaatcttccccttacctccacacttacacttccagctgtctgatggatatttctatctagatgtcccttatatacttcaaagtccttcctttcccaagaataaatctgcttctctcctaaattccccttctggcatcataatgttctcagtcacccacatcagaaatccaagaatcccaagtcctgacattttcctacttcccatgcccaatcaaccaccaaatccagctctttcaaattcccctttctttctctattcgatgctgcttctagccaaattctaattctcctcgctctcccccatataattacaaaatgcatctttccctccttcaatattgctctagttcattctctatacttcctccagtgtaatacacataaaatgccaatgacttccagctgataacacctcagtgcttcctgctcaccttcctttcacacatatgccataacttcttactttctcacatggatttcacacccctatcccactgctcctacctgcaatgcccttgtccaccctaccctgctctttacctaactcctattccactttcaggagccattttaggggacacctcctctaggaagcctgcttttacacacagccctctggccccagactgcattagctgccttttccattccttaatgcaccctcaatatacttttatcatatagaagttggtcatatctatttatgtgcctgtctcttgcatttggcagatattccttgaaggcaaggacttatcacctttgcttcttgagagcctagcaatgtttactgaactgaactgaaaataaatgaaactatggggaaaaatatattggtgggtatgagagtatttctgaggattataaatgtttagaaaagtagaaattgtttttcttacttatgcaaataatacctcatggtttacaaagtgttttcataaaagttatatcgtttgatccttaaaacaacccaagaaggtagggtaaggcagatattgaggctgatagagaccctaaatacataagaaatttctccaaaaagagaaacattattgatttttaaaaggggtgtgtgtgtttgtgtgtgtgtgtgtgtatgttcagatagatcttcataagatcagagctccaacttcaaataaagttcctgtttggtcaaaatagccaattggtttcctccatatttactaaaaagttttcccaaaaaagagaaactatcaattgtttataaaaaattttcaataacctgtttccctcttttcactactttccaagtagattttggaagacagaccagttaattcagtcttgtaaagacaaagagagaactaattcactctcaccttcagaaggtccactgggctagacacctcccaaatgtttttctgatttctgaagctatccttttctcaggagaatgccaacagctaagaccagcttttgtcgaagtcttcagcaaacaggggataaagaatgctgagagagaatgtcacaaagattcctgaaaaagaaaaaaagtaacacaggacaatgtaaattgttttgggttaattctatttagctgagatttcatcctactatcgtacgaaaaattgacaagggggacttactatatatcaaattccatgattaattttaaccaagcattattgtacttaatgacatcaatgtctaagaaattttaagcaacttaataggaacaggtaatgaaaataggtaacataattccaattacattgcagtgtaggacagaagtctgaattacccctaaatagcaggaaacaactgtgcacacaaatcaaaaagaaaaaaaaggcacttgatcttattctactctgatgcttcatgggaatacaccgtgctctataatcacatcaacaacaggccgtggcggggaagaatctaatacagactgaaaagaacaaacaatgaagaactaagtatttgatcaaggttgacaatgtcagagaggaactcagcaatgcaattagtattttagaggtggctttgaaggcggtaagaaaatatggcatctggaataaaggggttgctgaacacaccattataagaaagaaaaagcataaggttaaagtggaacagaataaaaccttaattaaacagaagccaactaacaggtgtgcttgaatattatgtttattacatatctcacttttatgagagagggtaaaaccacaaaaggaatgcttcaaaaagcttcttttaaaccagaacttagggtcagtctgtagtaagaagagcagaaaccacgagttctagacctgcctccaccactaacagtatggccttgggcttgctaagtgcttctcaaccctgcctgtgcattagcaccactgggtaagcttttaaaaagtatcgatggctgggccacatccagaccaaataaatccctgaccaattcaatcagaatctcaggtggaatggcacgcaactgtcaatattttgcaaaagaaagtcagggaagatattctttgatgacccctctagctctaacattctgtcttttctacacttttggcacctgacaactcatttgttttaaaatagataaaatttaaattgatagtatccaaaactttagaaccctataaatagttcccattttcaggaggcgggaactcagagtcaagaggtacagtgacttacacaaggtccaagcaaagcagcagcgtgagaatggggtcaggtcttctagggaggagaaagccagatggatcatgacctggggccagacacaactctgtttcaggatgggctgggtatgatccaaagacatgagccacactgatgactaggaagtgatgaggctcgtggctctctgggcagggatgcataaacacagggttcctgctttttaaggaactacaggccaggtccagtggctcacgcctgtaatcccagcactttgggaggcccaggtgggcagatcacctgaggtcaggaattcgagacaagcctgatcaacatggtgaaaccccgtctctactaaaaaatacaaaaacgcctgtaatcccagctactcgggaggctgaggcatgagaatcacttgaaggcaggaggcagaggatttagtaagccgagatggcgccactgcaccagcctgggcgacagagcaagactccatctcaaaaacaaaggaacaatagcaggcagggcacagtggctcacacctgtaatcccaccactttaggaggctgaggcaggtggatcacttgagcccaggagttccagactagtcttggcaacatgaagaaactgtctctacaaacaaacaaaaaaaattatctgggtgtggtggtgcgcacctgtggtccccgctactccagaggctgaggtgagaggatagtttgagccagtgaggaggaggctgcagtgagccaagatcatgccactgcactgcagcctgggcaacagaggaagatcctgtctcaaaaacaaaaacaacagaaaatagtaatcttagtagctaaactactgagcaccttctatgagctagacactgtgccaagaagtgctttcgttctcacaagaactctctgacctaggtactattatcattgccaatgtatcaatgagggaactgaagccaagagagatgagtcttgtctcaaaaatgatggacctcgaattttagaattttaacaaagctactctctctcccgaccatgcgttgcctcaaagaaatacaactcccttgcaggctggaggcaaggctgctctgccctgatatctactttatcttttttgtctcaatgcatcctcacactggaaagtggaaacagaagcctcctggagtctccatggtgtggtgctttcagattttctcaggctaaacaattaaatttctgttgagagagaattaacattttatggaataacttttattcttacacacacacttccaaattagtacactttggatgctgagatttaactgttttggagaagttcagctcaggcagccatcagaagagtcatcactgaaaactgccctaaataactcagtccatcatgatatctgagtttaaatgcccaactgaaatctctggaacatcattcacaattcatgggtaaacaattttcctaacattcttacattcatcttcaatcctcttaagagaagtatccatgtcgcagtttgctgtcccattacatttacattgggtaaattatttcttttatttgtacagcattgttatttactataataaaatctaatttacaaatatgttgcatatgaaatatattttaagaggctaatgcaaaagcattactgtttctgacaccttaggcatatcctaattatactgtgtcagaattatcttcatagctcattttaataataatgtgaaaagatggttttcattagacacatctgggaagaaacagaagagtggtattaaaaataaaaacacaattttgggagacagaaggagcctggaaggtcactaaatccaaccatctatctgcctgtggcccattctatttttaggaaattctatatgaagctgaatctctcttcctgtagctttgacttattgctcacaattctggccattggagccacacccaggttcatattctaatgttaacttccccaaccacagcccactgttcagaaaaacaaggataagctattgttttggtagaggtgctgcttggatcaggagtgagcaccttagaggctggtggatgacccaggaggtaggtttgtgcagagatacgctagaacaaagacaatagtaagacaaattgatcaaaccagctctttctgggatttagttgatgttgggagtcagaggagaacctactaaatatgcagagatagcagaaagaccatacgagagagcatgtgaaaggtgtcagtcccttgagtcatctcaaaccgaactttctactttacagatccaaacagggcagctgtgcagcaagcccctcctccttagagtgtcttgagtgagttgctgttttctttggcccagagtgcccaaattcatacagactaagattacagcactccatttactgccattcttacagctacatttcagactgacagttaatatttctctaatctttttgtaggtctttttgttagaaacaagtgaagcctttattttcacaacatcaatatttcaccttcttagattgggtccattatcccaacctgctaaaaacttttgacttcccaatcttgtccttacgaaatattcattatgccatcatctatgagttagacaagaacactatctagcaaaatattaatgctactaataaaaaatttaaaagccagcaacaataccaaattggacacaattttagagagcaaacagtagtataaaaatttgaaaatcaaattgttagtaaataaatttattttagtgtatgtcattacttaaaattaataattaccaatactctaagttgattgccaattatcctgaaaatataataagctacataaacggacatgaccaagcaattcatttgctggataaaggttttaacatttactcgttagagactgcaaaacccagaagaatgaggtttcggcatcattagagaaaatgaggccatagttgagataattggtaacatgaactttgtagctggagtaattacctgtgcagtcaaccaagaagttatgtttgagaaacatattgcaaaaacagagccaagttagcttcaaccttccctgaggcaatcatggaaattagcagaatctgtcattttaggtcatcggtatccccttgccaaagtgaaattgttctctgaagaagatctcaactgcttttgtctaatttagttctcagtcagcctcacgggatctctccttatggtaaaaagtctcacaccgaagggctttttaagttctcctggctgcttttcttagtttttctgactccaccattatagtcaggtgccacttctcaggtggtcagtatgcctgcccagagcaatttaacccagcctcactccactaattggatatgcctggtcctctccaggctgactctgggtaaagtaaaagtgaagtgcctcagagggagagcccgatgcacgagcctattaaaaaagcacgagtgaatgtgtgaatttcacgccatctctgatgaccattgagaggcctttctggcttgcttccttctcagttgtgctgaatgggtaaacttttccttcaacaactggtgttgtagacccattaggtgccacaagaaatgcaaagactctaagacttggcagctcctgctcaagaacagagataggagataataccaatttatgttctatggcattttgaggcttatttttcatagaggtaatctcatttaatactgaaaacgtcgtttttctagcattttacagatttaaaaagtaagtttcaataaggaacttctcaatggctcatcatagctagtaggtggcaaaaccaagactacaagtattttgtaattcttagtccacatccactgacccatatgcaggcaaaatgaccacatagcaatatgttgagtgcttactccatcctaaataccgttaaaactggttagcatatatttgatcctcatgacaacttaatgaggtatgcaatttcaatatccccatctaatagatgagaaaactgaggcacagaaagaggactaatggtccaaggttgtacagctagttgggggcagaaagtgataaacacaatgagagccctgccacccgaatgtggaggaagttgttggatttgttgctaggaagaacgctaagcaagttttggaacgttttctggcatttccagaacagtgagacttttcttctcttggaaatcttgtgaggagacattggcatcagagatgagaaaaagatggcaattccaagaaaagaaggaaatgtgattttttcctcgtcccctccgctatgactatggatgtgtgagtgacttagcagcacagagagctagcggcatatgaataccatctgctgctttaatacttgctatgtatattttctgtcatttcaaattctttggacagatcacactggttgagtaaagcagagagaagagactgttggcattcatgaccttacatttgtggtttgtgatttgacagtggacacccaggaagtttattaagtgtagtgatttagcaatatgctggaataccagtttgcatcgtacaaactcactggctactgggcattcacgcctcagtgcggcttctttgttctgaacatgttttcgggtatgaaaaaggcaggagccaggaagaaaggaagtgctccagctttcagtgagtagttttcatggtccatacttgggactcagggcttgcaaacacctctttgaaccctcacaataatcccataaggtggacattattgcaacaatttcatacgtggacatattaaggcacagagaagtctagtgacagaccccaaagtcagagagcttgtccatgtcagagatggcatttgaacccaggtctttctgaccctgttgtggcatggcctcttccatttctgctcaaagagttaagcaaacacacaaacaaaaactttgcaaagaggagggaaagccactagatgacattacgttttagttaaagttagaaaagcagtatctttagatatgtttgatatgtggaaaaaacacaggacatttagtggaaattagttccaggaaaaagccagcagcctctacaaaccttttcatatttttgaattaagaggtaccttaggtcgggtgcagtggctcacggctgtaatcccagcactctggaaggccaaggtgggaggactgcttgggcccagaagttcaagaccagcctgggcaacatagtgagaatgcctctacaatttttttttttttttaatttaaaaagagatactttacagtctaagaagccagtccccaagggactgctgtgttcccaggaattcagaagtggaaggagaaatgcatcaaagataggactattcctggcctagcacaggggtaagggtgtgaccatggtaaatactgtgaacaacaaataaagggcttaggtggtccaaaggagacagaaaatacttctggctggaatcaggcagtaaataatgacctcattgagacactggcaggaaaaaaaggggagaaatagaatgataactttagggaaaagcaagatgagaagtgattttaggccagaggagatttgagcacatctgtaggctgacatgtaataagaacagacaaagaaagcgagtgaagctgcaagttggcaagagtaaacagagccaaggcctcatgtaaagggttgggaataggatatacagggattagggagtttctactatacttcagccacattttgtgcacatcataaaaatttaatctacttcaaatggtaagggatacagagactcatttcatgtctccttccatgttggagagaacactcctcagattgaagcttttctgaaatggccaaaaactattacaacagcccatatgcagcaacctgcttatttgcatattgcccagtcttcttactggaaaacagctggagtcagtcaaaatgaaatgaaatgccagcacacttcaacagtaatacaaatgccatgcaaccttgaacttgagtttaatagaataaacaaaacaatttgctttgatgactctgaaaagcaactgaacttgttccaacttgagcaggagtttgtttattttgcttagctccagtcatttattcaaatcactcaagaaacatttagtgagagcctactgggtaatgcatactagtatgaagctagaatgctaatgattttcatattcttccttcatttctactggattattttagatagggtttcatttttaggtggggaatttctgcagctgatgtttaataatatttattctttcttatcaaaaaattgttttcattttccaaaatataaaaagtaaagaaaaatttttaaaagaaatttaaacattttcttccatgttcatgttttggtgtatgttttccaagtcttttatttttcttgtgtgtctgtattcacttttttcagaatagaagtggtatcattcagcacacactggtttatcaacctgctattctcacttaaccatacaccatgaacatttccccaactcattaaatattctataaaatcatttttagtgtctgaatgatattctaccatataaagaaaccatatctatttaatcgctgccctaatattggatattaatgttattccaactggctgactttttatatgatttttttaaaggtgcgctattttactagcactggctgaaaaaccaccagtaagattgttatatggaatctgatatatggagcattattcaactgtgaagttccatttctctcatctaagattgtgatcaactgaaccgagagtatttcaggccaagtacctgctcagagcacagccagcccaaatgcccacttatttctcaccttctcccatcacagccctgccctcaccatttgctgtagatctgtagtttgacagtgagcagtctgcctgattggaagggaagaacagctagaagttatgtgcttacccagctcatgattttgaggctgtattgcagtagttctcagctctgctggacttgggaatcacctgagctggttttaaaaccacaggcgatatgtttactatcttgattgtgttgatggtttcacaggtgtatgttaaaatttatcaaattgtccattttaagtatgtgcagtttgttgtgtttaattatatctcaataaagctgttaaaaaagcaaaactccagatggccaaagcccacaattgagattccgatttaattggtcttgggtaggactctccaggtggttgtaatgtgaagccaagaactattaatctaatatataatgaatctttccaaatttaaattgatgtgattgatataaaattgataagggaatatttttaaagaagtgattttatcattttcaactacaaacaataacagatttgttttctttttttaaaaaaactgccacccagcaaagaaatttagagacttcctttaatgattcataataattcataaatccaacctttaattgcctatcgtgtactaggtactatgctaggtagcacatagattatatgcttgtatggaactgacactttttaagagcccaacattctcttaaatgaatttaaactagattaaatccacaaactggttaaatattgatttgtctaggaagaactaaacggagaaaatgtaaaaatgaacctgttgtggccctatttggtggtcatggattctctatgagtgccattcaaatccaggaggttttgctctatttgccaagctgctgagctgggcacaggctttttagcaagaatgtgagaaaagctgtcccggaaaattggaagcttcctgccagagggcaccatcctcccctcctgacatatgaggttctatgccagtgtcttcacatacagataccaagacagcttcatatccacaataaaatagccaaagcctcttattagggaaaattgatatttaatattagctcacatatgtctttactccgttactaatatgaaactttgaacataattagtgttggctttgaatgcagtttggaactgcacccagctggaaaggggccatggagcattgggtttcattcctcaccaagctgagcactccctgaaagggattagaagagaaagaaatggagccgaccctcattcagtaagaaatgtcctccttgggttcagtgggatgactgtagaggcggggcgggtaggagaactgggactgtcaccctcctcaattccttgtcgcctcctacctccacaaggcattgcaaaatgaaattaggtgaatggagcccttaagctggggaacgaggggtgtgacatattcagggagctgtttgtgtgagggaaggcacaaaacacctgcctagaaagagaaggtggctgtggagtctcacacggccccagaggagtgagattcactttggtcacaggatggaggctaggcaggaatttgaggttaggtaggatcaacgcgtgcagagcattaagagaaatgtaacctgcaaaaaggtagaatttccagactgctgaccactatcactgcttcagctaaaacaaaacaacattgaatgttttttcctaaatagaaatggatgacatattttacatcctgcataggaaggaaagtaaagccatctggcaacttccaataaccagctcaatgcattgcacctcccactcctacgaacagtctgtgacagccacacttatactaaaatctaaagcttctgacacttccttcccaaacttccccatctgttctgacatctcctgttgacctctctccagagcctctttagatctctccctgggtcactcttcaattccattttcaccccggtgccatctcgcgcatcaccccagtctccaggcaccaggcctgaggacaggtcgctcctccttcattctgatgcccagctcaggggtccaagaccccattttgggggaggaggagcatgatggcttcccccatgttctaatggtttcaacagcatcttatatgtaacctgtaatagacccttattttagtagtgaaaaattaaaatttagcaaaatttcccctggcaaaaaaatttcacacccatagaagctgtgaacacaaggttatgtttaccttgttagataaaataatatgcatagacttttgaaggacatctagattctaacactatatcataatttgcagttctaacttctaaataaaaattgttttgcatattatatctttctttttaaaaggttgtatttgaatgattgatttcccactaaatcaagccaaatatgtgtctcacctttgacttattcctgccaccaccttgtttgtttttaaatcattacaaaaagaagaaccctgagccattaaaaactataggcatacccagcaaatagttcctgactcaagagactctcaaatcaatattcttaagttgtattttagtacaactgctgcaactgtgcggacctcgaattcaagtttaaaaacttcattaaagtacagatagaaaaatataagcccatattaaatagcccttgattaaatttgggtgtttccttataattctagtcactatgactgtatttcacccaatttcttattaagaattgtcttgttatagtggttgcagtatgcattgatactcatcccacaaacctttaaaacattacaagccatttcatagaaagactaggggataattttcttggacaaaagatgaaggtgaaatgtgagagtgctccttaaatttgatgggtttctgggagtacagtggttgccagtcctcactgtacatgaaactccctggggcactttcaaaaacagttctgatgcttgggccccaatcccagggatttaattggtctgaggtagggactgggccttgatcaatttttaaagctcaatctaatatgcgttagaggtaaaccttccctgaaggtagattttactttaatacagtactaagaactttgtaaggagaactgtccaaggacaaaacaggtcacctcgtgagggtcaagtcctttgtcacagcaagtgtggaagggcagcctgtatgactgagcccctatcagggatagtggaggaagtggtccagcatggggtggttcagacccttgaaactgattttttctatactagttctatcttgggtcagtatttaaggtaaagcaagcaaagaaaaacgccttgtttgctatgtcatccttgaaacaaaatagtttatataacatctttcgtatcatcccgataaaacttgttaatttgcacacaaaatcaagcacaaaattttgttccattttcagttttattctgtttttttaaaaaaactttccttctacaatgaattgattatattctaattgttgatactttttccaactttccactacttcagcctatgaaaggccttttttaatcagttggcatttattttttcttcaattcataaaaataattcctcatcccaaatgttctgtgaaatgttattaatataggactacctgtggatttctctccaattatctttttttttcttaagcactaacatgaaaatttcctctaacctttcctgggagatacattttggcttttatttaaaggatgatacccttaaggtttttttccttcaaatttaaatgcatgaatacttgcaggagctaacaggataaaaaggaaaaggtccctgaatgtctctatcattaggttgggatttttaaagttttgctttttgttgtttctctataactgggttgatgttaatactatatgctattttacaacttactttttaaatgttacaacatgtgttgagattgttccatatcagtagacatgggcctagatcttttctatttttataaaataaaaataaatacaataaaaagtaagtgagtgcaatggcgtgatctcagctcactgcaacctctgcctcctgggttcaagggattctcctgcctcagcctcttgagtagctgggattacaggtgtgcgccaccacgcccggctaattttttttgtatttttagtagagacggggtttcaccatgttggtcaggctggtctcgaactcccgacctcgtgatctgcccgcctcagccttccaaagtgctggtattacaggcataagccaccacacccagccaggcctagatcttctaacagctacacagtatggatgtaccttagtttcgtaaccattccactgttgacagtccactgttgataggtacttaagttgatccattttctttaaggaaacaaaactacagtaaacaatcttgtaaatatgtttatgtatacacagatcccccaaaatggaatttttggttcaatgattatttacaatttaaattttgataaaaaatatcaaattgacttccaaaaaggctattatgatttacacattcataaatgtataagaaaactgtttttctatcttattgccaacactatataccatcaattttcattattccaatctcaaaggcgaaaaaaaacaactgagtcttgccaaagtttagagtgtaagccaaagcatgagcaactttctagattgttgttaaattttacaaaaaaaaaaacccaaaaaacgatgaagctaaattatcacagcaaatgtctgaaatctacacccaaacctggcgttttgctcagattctaagactgtgtgagacctttgcagtaactccttcctcttttccccctcatagtcactttattgtatttttaatgttttatttttatggacaaaattgtatatatttataatgtacaacattatgttttgaaatatatatgcattgtggcatggctaaatcaagctaataaatatatgcattacctcacatatttatcatttttatggtaagaacacttaaaacccactcttagcacttttcaagaatacaatatgttaataactatagtcatcatgttttataacagatctcttgaatttattcctcctaacttgttttgtatcctttgaccaacatctcccaaacctccctccgttcccaccaccccagcccctggtaaccaccattctactctctacttctatgaaatcagctttttaaagattctacatgaaagtaagatcatgtggtatttgtctttctgtgcctggcttatttcactaaacataatgtcctccaggttcatccatgttgtcgtgaatgacaggatcttattctttttatggctatatagtattctattgtatatatagactgcattttctttatccattcatccatagataaacacttcggttgatccatgtcttggctattgtgaatagtgctgctatgaacacaggagttcagatactgatttcattttttttggacatatgcccagttggattgttggatcatatggtagttctatttttaattttctgaggagccacaatactactttccataattgctgtactactttacattctcaccaacagtgaacaagtgttctcttttctccacatccttgccaatacttcctacctttcatctttttgataatagtcattctaacaggtgtgaggtgatatctcactgtggttttaatttacatttccctgatgattagtatgttgagcactttttcatatatctgttgcccatttgtatgtcttcttctgaaaaatgtctattcaggtgctttgcccatttttttatttgggctgtcttcttgttattgagttgtttcagttccttatatattttggatattaaccatttatcaaatgtatggtttgccaatattttctcccattccaaataaccctttcctctttataaatccttaccactatagcctttgaaagacaactcaaaactcacctcctccaggaagccctccttgattaattaccttgatctcacacatttttattcttcctttactctgatccttcaacacttacatatttagtctaaattggcttttaggtttccctttgtatctcccaataagtacagtaagacaggaatatagggggcaattaaccaacagacatcaataaatatttatcaaacatttattatatttagttatccagccaatagaaattcatttggtgctgtattgagtccaatttttctgctttcccaggtttgcctgcccctctccacactgttcctctggctgcttgctcagtgtaaagtccctgccacagccaccatcttctctcccaacaccatcagctgtctcagcctctctgtagctgatggctctgactcagcctctgtcatgtccacactgcagcaggagctacacccctgcaccctcatcctgtgtagctgctattatagagactctggcttcttgaaccacttctacattccaacgaagcaccctgctgtggggtataggatctggctttcccagaggctgatcagagggtcatggtaacataatctgaaaacaggaacttaaaacttaatgcggaaaccttgaccagtaagagacaggagacaagaaggagctaaaagatcaattccttgccattccttcttgtgacagactgttgcaaagtacagtgtgatcccaaagacctgtctgcaagacagtgtgtgtcacagagcaaccagctgtatttccttgagaagctttggacagcttggcaaagcactgttaggtattatttgtctggcttcccccgttccctcactatttttgtcctggaattccatctcctcataaaaccttctcaagtgagctcagattctgttttctagggaacccaggctaagacaattatctacataaactctccactctacattagactagccctgagaaagggtacaaaagaggcataaaagaagtgaatcctgtccacaacaacctcacaatctaactggggaggccagactctacctatgtaacaataagtgaaaaagacaaaggaatgaatgaatgtaattagagggcaaattgttcagtgttttagaaaatgggagccatttgataccactcagtgtacagggcccagaataaaacaaaaagtattcacagagaagaggaaaaccatcagatctcacccacggcagactgctaggaagaggggcttaaaaaaacgctgggaagacagagaaggggggaagactgcagggagtgtgttccctggagaagagtcaccttggtgaagccagcacaaccacaacagtgggcgtggtaaggagaagcagggagagcctgaaggacattgggtttccctgaacagaggggcttgctggggagcagcagggtgagtccagggttcatagcagagggctgtggaggcaagacagaggggtttggaggtgaagggcatttgctactcctcatattaccacagaagagatgaaaaagaaaaaaaatactccatttcttaggaggttgcagtataatattcccagcttctcccacaccctccatcacacctgtgagccaacagcacaaggaatctgggggaagaaacaaggtcttcttggccctgagccttctggtttccctttcatatctgccatctgacaacaggggtacctttccttggcaggcctgcctgtgtgagcaacagcctgcggtgggaccttgagggtgacaatgtctaatggagaaggaggtacctggaagccctgtggccgcacgtctaatcacttccccagtcagcctgaactataatcaagctggcacttctccttcaatctggtttttgtgtcgtctttctcaaatggtgcaaacttgggagggaggacaggaacattatttaatgacttcctaaaacatcaaaagggggcttagatctgatgcaatgagaaatgggcatggcaggaaagaagcatgataaaaagagataataaatgcttcttgattaaatggttggcctacatcctaatttctacccataaaaaggagaagaaggccgggcgcagtggctcatgcctgtatcccagcactttgggaggccaaggtgggtggatcatctgaggtcaggagtttgagaccagcctggccaacatggcaaaaccctgcctctactaaaaatacaaaaaattagccgggcatggtggcaggcacctgtaatcccagctacttgggaggctgaggcaggacagtcactagaacacaggagatggaggttgcagtgagctgatatcacgccattgcgctccagcctgggcagcaagagcaaaactccctctcaaaaaacaaacaaaaaaacaaaaccaaaaaggagatgagagggctccgtggtttccacatggttgctcttatgtagttatttttaccctccagtgtttttcacagtggccctctctggctttatttctgtcatgaagttcccttttcctctgagagatgctgcaaacatttcagaaacatttcacttgcttcttccagtccagaagagtgattcttccatgacagaacgggccagctgctgatgtgagcccatccctccagatcagcatgactaagatattcatcttcatggagcaagaataactacaggagatttgaatgctgcatttgctttaaataaaactgcagatgcaattccaggagtaggatagagacagcagaaaaacagcacatttcttttatagtatcatagtgtctattttaatcagcatattacagatgttttgagacattctagcaaaattgacatggttgacaacgctagacagaactgcctcacgggggaaaagaggaaaagattaaaccacaggcgtgtggcaaaggaacctgctttgtcagaactatgctttgtcatcaccgctgagatcagagagctgtttctatggcagcaggcaacatgttctggccaggagacaatcatgtagggatttttaatttcatttgatgtctaattgcctactacttcgggaaagagacaaataattaaaaaaaaaaagtcttccttaactagacagactaatacccccaaggaaaaacttgggtttttatagtatgcttttcaagatttgaatttcatgtctgtatagttgaaggcatgggaccttctccaacaaggcagaatgaaaccagtaaaaaggaaaggaaactcagatgaaatttccatcactgcagagcagttcacacatcctgttaattactattgccattcataattaagggaggttcctcatggatcttactaacccttctatcaaacagcacctactcttgcaaaccattggaagaggttgtgctatttatgacaggtccctcccatttcagatccatgctgttcatttccctgagcaattaacggacattacaaacacatattctccagagagattcctagtttgggaacatcacttttcagatgttgctactgttgtcactgaccatttatttcaatgttttccatcttcccttaaagagtaagtgattgaatgtctcatgattctctgcttttgcaacataacacgcttccctccatttgatcaaataatactggtgcttctaaggatcctttaagctaatagccaacagtagcctattttaattgctatggagatgtcttagtttgtttgaagctgttataacagaaaacctgagactgggtaacttataaggacagaaatttattggctcacaattctggagtctgagaagtccagtatcaaggtgcagacatctggtgacgaccttgtagttgcgtcatcccatggcaaaaggcagaaggacaagagagagcaagagagacacagggaagggggccaaactcatccttttataataacaacaatcctacctataagggtggagccctcatggcctaatcatctctcaacagtcccacctcttcatactgttacaaaggcaattaaatttcaacgcgaattttggaggggacaaacatcctaaccctagcgaaagaaaacaaataattttctggtaactgaggtaaatattccagcaatttgattgggagttcatgtcataatgagctataattttttctttttaattcagatgtccagaactcaacttctaaatctctggacactaggcagatggctctttcttttcttttcttttctctgctcttctctttctttctttttcactctctttcttttttcttttgcaagttacagaggtgacactggtgttaatacctggttaaataccactcacggacagtcactcattgcccagctttccaatactatggcagcccttaagctgcaatgaattaacaatttgtacacaaagtgggcaacaattctcaatatcacaaaccaaactgcaaccttttagccatttagcactgaaagttgctatcactaacactgaaccaatgggatgcaccctgacttcagcagaagaataaaagcatggagctctggaaacccctctgctcttacatcatgcccacagaagcaacacctgtgacacgcagaccaagaaatgacttctaggtgaccaggagccgtgtggtcactcaattccttgagtcatggctaccacaggtctgcatttctgtggtcttccccacagttcaaggccagtgcaaaaggacttgctgacttgtatttctggagattctctccagaaattggtagagattctctcaccaaacaaaagatttctgtgcttctatgaagcacacaatatcaaagcatctattgagaagaaagacaagtccactcacagaataatatgcaggagggcatctccagggacaccaatcacggctaggatcttaggacaaatgttttcctgaagagcataataatagatgggacaaacgatgacattctgacttgaagtggtcagcaccacagcctgcctgtgaaagcagcattggcctgaccacacactggctgggaagggagaggtcttttatctggtatacatattatacacacacacacacacacacacacacacacacacacacacgcactgaaagttgctatcactaagtatatatatattcacccatgtgtgaacaattattgagcacgtaagcacttagaaaatacacaccatcctcattttcaagttataatgaaggcccatacttaacatgattgattaaaatggtttgatataatttcaacattttaatacaactgtgtggatttttttctggcttattttatagcataaacatttatttgaccatcagtgtataggcttttgaatatgacacaagtaacaagtctaataacatcatgccacataaatattctggggaaaaaaatctgctcaaaatttgaaaaatcgagtgtttcaggaatgactcttccctacccataacttccaaaaatatcccctagtccttctgatattgagaggcactaacaggatatatgtatacttaactagtttcacacacacacacaaaaaatcaccgtatgtccgctctggttagggcttatcgtatgtatttcctttcattgccatctgattcattgcttcatcttttctttaagtaaaaggagtgccctcatccccgtaactgttcttagaagataacgttagtcattgtattcctacaatatgcttctcatctggcagttaatttccccagagggtactgcagacgttttattttcagataatctccaattagcttcctctcttcgttaccctgaccagctcactttcataattttctcctatacatcctcctcctcttaacatatttcttacttcacagggaagaatatgatttatattgcttttcatttacctcacttctttcctgtttacctgcttgctacagattttgcattttaatatccaaaatccaacataaaataaagctgcatgtttcatcaaatgttgctcttcccatctgagctcactttgcattcagtccttttcttcatgagtttggcagtatatatagagtttgaggtatatattatatgtactcacaaacaggcatgcttaagccatacaaaagtgggagctcacccaggtgctctcatttcaaaggcacttcttttctctcagaaagttacatgtctccactttcgtgtccacacacaaaattcctttatccaagataaaaacttttaatgtcaaaactagagatatagtttaaagcagaacaggtaaataaataacttaaattttcactagtggatgaaagttggattctttcttgagaacaggttttgatgtcggggtgagggtgtccagtaggcattaagtctgtccaggtgcacctcagagaagggaaatgagtgtatgtaaaaaggagaaactgaggccactgaatacacttcacttggttttccattttatgtacaacacagtcatcttctagttatttggtagcaaaccaagaatttacaaatttaagtacttacaaatattttagttccatcgtgtgtgtgtgtgtgtgtgtgtgtgtgtgtgtttatttttaattttcaagtatttgaatctacaaaagaatatcctttcagaacatctgtacccagttaaggaatctgggaaagaaaacagaagtggactgaaatgtgttggtcttatctttgtctggcctctatgaatatcttgactgtcatcaaaaatatctctttagtagatattactatagagattctgcttttcagacacacacaaatccttgcagacacttgatgtctgatgagtgtctcttttatgcattttgacttctgagaaggtctctatccccaaacagtgagcactactttgctaaaaaaagtctgtgtgttctgaataaatggaaacgtcttaccaatatatgaattgctgatctttaaagtaaataaataggcgaatagattcttatccacatttcttctagccacaaattttaaggaaatcctgcagtcctttacaagggggggagtttctcagctagatggaaagatatgacgacaatttccccattcacaaaacatttcctgtctccgtaagtacccactgcccaattactcattttacacttattctgtgtgaatttacattgtgacttggcatttttaggcatccgtggttcctactgatttcctctggtccccattggtttcctttcttaggctttactgaatctcccaagggccaaagtagaaacccaattaatgcgtgcataacctagatggctcatgcccttacttttacattctttccattgcatgacactgtcttggagctctttaaggaagcatctttcaaaatcttgtgtgtgagagagagaaaagactcacagaaggaaatgtagaatgggaagaaactattcatgaggaatatctctttaatatagtaagagcatgttggtagaaaaataaagactgcttgataactaaaggttaataaaaaccacaactgttggaaagcaaagacataacttcattcccccacataccccaaaatagcatacacagaaaagcaactctacatagccagttaagaaggattaattatgcctctaccatgagctcaacattatggtaggtgcttagcgaaaaaaagactataagtgtagatgtatatatgtgtgtgtataaaacgtgtaaaacaatataaaagaataatatcttatgttagatggagtggaataggctgaaagcattaggagagaaattagtgtgagccggatattagtatattttagctaatttgcaaaaactcatctttgactagtcatgctaaagtattgcctataatatcacatgccatttatcaatgtttacatgtctcatgatcatatattcaaatgttgataattattcaataatatagaccattgcaagactaagtcacccccaatgagaaatgtaattcaaacctgtaaacctactgaaaatggactgaaataaagaatgtgaatgcattttgtagaaggaaaagtattattcatgaagtagatattagaatcattattactattgtcatctttctcataagattacttgaagaaaaaaaagtacaaagttaaaatacaaaatgatgtcaattctgtttattaaataaaagaggcaggtattgttttccctgtattccagataaggaactgaagctattcaatctacaacttaagaaaaatcaattgggtagcaaccactgacagagtaaatcattttgttcttcaatcatcttgtatttctgaccaaactgcacagtttattttgagaactctgtggttttagtttaggattttaggagtctagagagacttctgacctgccctgtggagattaacgacatacttaattctgtttgtctaacagcaggcaaaagatctgactagcagaatggcagcaaccttttccactaaaacgaaggtatgtttatggcatgccacatacagtggaacagtagtcaaaatagtcaaaacaggtctattggaagtggggattccaacctcctccacagcaaaatacatttcattgataacacctcctccaagagccacttcacgagttcttaggtcagagtatgctcctcccttctgtctctcttctctaagctgcaataccagtcacacagccttcaagctctatgttccattctacaataaatgtttcaaataaattccaacatgacttaatgttctaagcttaaaatgccatgttatagtagctaacatttatttagtgctatatgccaggcagtgcagtaaacactttacatggattatcttatttcatcaactgttttgggaggtgggactattattaccccattttcacacattaaaaaaacaatgccaaagaaactaaaaatcttgctgaaggtcacccagctaagtcacttactgaatactcacttactgtatccctttggcccaagctcttttatgtatatgaaatctttcaaacaaactgagacgcagagtgtgtaatataaaatacatcacccaactttgacaagtacacttaaagtaaaagatacaggtcatcctttacataaagatacattttaaagtataatggggtttctcaatcaaaaagaaaagggcaataggaagctgaggactgaagtgaatctacacccccataaagaaagtcctactaagaacagtgccaggcattgagaaggtgcttaataaaatttcactgaacatgtaacaatattttcctttctaaatatataaaagaggccagagaagataatctgaataaaaacatgatggtccaatgaggagcaattcagccacgttctgtagtgaaagagttaccctttcccacctgccctgactcccaccttccctggctgcagtagggtggtcctctcatttcagccccccatcttagcctccaggagccaagagaaggggccactgcacaggctgagtgcaggggaaagcatcctgcctcctgcccagggaaacctaggcaggatgtgaaatagagttaaagacagtggttacctctggagagaagggagggggatatagttgaggatgggacttgagagctattggtgactttctgcatcttcagcttggtagagaggacggtgattctcattatgtccctctttatctttttgcatatatggaataatgaaatatgtacataatacaaagatcagaggtagctgaggggagaaaggatagtgagtcaggaaaggaagtaaatgaaagcataagaaagatgaaaagtaagaaggaagggaaagtgaaggagaaagagtcaggtggattgggtagtaagggaagactgaggcaagaacacagccttcagcaaggatctcttaacaaaagtggggatgggggtggaaatcacctgattcagagagaaaaggaagaggcacacataaaatgagaaaatcatgagtgaatgacgagataaaaataaaaggtaacttcaaatatgactatgtgctttgagcttgctttaaaagagaacttcagcagtgggaacagaaaaggtttgactgatgaggtaagttccaaaatacaaaaccaagaagcacctcagtcgttgcataagtctatattccagctaacaaagatacatgttaatactttaagctctgaacttcatttttggtggcaatcatgctaaaacatattacacttcatgaccttcttaaacagaatctgacctgttctctaccactcggtgtcatcaccaagaacctgggtgataacactcagaggctattgcttgctgtggcagggctagggcccccacctcccaggctagaaacacctagctacagggaagccacataattgacatatgctgacgtcagagtgttgaaatcctttttctggaagttgatcttaaagtttggccccaatgaacatagggacaaatcccacatctaaatctgttaataccactgtcatcccctcttctccatgtgcttctccctctcttccaaaaggaaagcacatattccaaatgtgccccagggcagttgttctgatgatcaatcacactcacctctttgagcccaccgaccttggattatgcactcacatgaaagaaaagaaaccatatcccttcacagccagaaatcttcaggccccaatgtagcccagtgctgactgaccagttagagcttatcaggtttcctaccaggagtggggcatcgaagagagctggtgagaagggagtgagctagaaactgccccctcagtcccatgtagtcttcctggtgaaataactgagaaggtagccattctgttcagtaagaaagatgaggtgctggaaaaactgcctgtgcggtggcttcctggaagctctggagaagggaagtcggtcagaggtgtggctagtgtctcaaactgataattacagtgcatcaactaatcatttgaataaagggatgtgttgcctatcaggcaagaaagcaaagacatgtggaagcagaaaggggcactttacacaaaatgttaaaacacatcattttcagacttcgtagtttttgtcagtggggtttacactattgctcttgatttttaaaactgaatgtaggttagtcctatctacacctggagtgcaatgcttctcaaaggcgcctgagtgaatagtcatttcagtgaaattgaataatatattctatcatgaaaatatcaggggggaaagaatgtactggaaactgacctgtctttaaaacatgtataattattaaatcccaaatctgcatgttatttttgagcagcaatatgactatagctctatgagtccaatgtctaatagaatatatatgaaatatacattacattagtgtattcattttgtttcatctgcagcctttctcaagcaggattccacttacttctgaaagaattaagctctggagaaaattatttgcatgattattttctcaattctctcaaggatggtacatagctagtgcatagataagaagttaattcattacattcaattagtgccttaggacattagagttcagtaaagtcttcccccaacccctcgatttcatggaaattttttgcaagcatgtgcacatgagcaattttctggggtgagatgtcatggctttcatcagattttttaaaagattatgacccaaaaggttaagaaccactttgctagaatattagtaagattataagaaaatatgatggtaatggaagagaataactcagaagaaatggaacattaaaagacaaagttttattttcccaacttttatttcatagatatttccaaattcattttgattattttctcccaatatacatggagactgacacccctgcacaatactaaatcccaaagatttatctcctatgactctgcaaagtgggaatctggccccagaagagatgatacatgtgcagtattttaaatcagtgggttttatatgtggtgatttgggaaggctttcaggttcaaaatcatagtgtgtccattttcctcacaatctattatgagtctgtcaagatacagaaatatatcccaacaattttgctgcctcaaataattatccctgactttatagttcttacatatatttaaacatactttcatccaccgaacagatccaaattcaaggttataaattaaattacaaaatagcaacgacctaaacacaaaaaaactatcatattgacctgtctggctctagagatgatattggcaaactatgtgttgttattattatcatgacagattaactgttgacactgtacattgtctaggtgcgtcctgaacagaaatggctggagagttcatggttcacacatcagacagaagtccaattactaaggaaagcctcagagacttcctctcaagagggctctgctttctctcattgccactattgctcctggctttctttcgagtctagagcaactggcctaaactgctgttttatttatgagaaaggaatttttttaatgtatatcatacaaagatgacactaatgcattcatcatttttaaaaagagattcagattttcaagagagtacagtgaatgactccaggcatgcctgaagcaggtctgattatgtctgtgtgactaagaaaatagctacatctctgtcatcagaactacacatgaagcagaatgtggttatgtgtctaattttatgttcattttatgagctgcagctacacaactctttcacatattatagtctcttataaatgtatatgcacccctctcccctaaaactctagatgttacatggggacaataaaacataccttcttcattactgtgctctaggcacaaggcttaaacagagtgagcacttgatacttcccctttattttaattgtccaaaataactggttaaccaaatgcctttatagttcataaagcattcaaatgcctaatgcccatagggaaatccattttactctgaccagatgaagtctgcaccatttttctttctctgagcagaagcctcattcagggtaaggctgaagcccaccccccttataaaacaagaaggtctaagatgggggtgaaaaaccagctacattgatcagagaaggccctgacttcttttccccatcagcagattaagaccacctgtcatttggcctgaacaaagggcacacaagcacattttattaagcaagcaaaacatgtaattatctccacaacacaaaataaatactttggtattatttgttgtttttcaaatatctgtaaaaccagacttcaaaagccataaatattgagggaagtgggtcggcaacaatgtgtaaaacactgtgggatgttcagatgatacatgcatcctgcttacagctggcagtttactattccttgaacaacgctttcatcatcttagttattgaatcaaagtctgttattgctccccattgtgcagtggggtaccaacttttgactaaggaagtttattacaatttgatccactttattcatccaatctacttctccatattccaacaccgaagctctgctctactcaagccagagttacttactgtttcacgaacatgcctttcctctagaatgcccactctctaggctcctcactccaaatcctagggcacctgaaggcccatctccattcctttttcttctaggaaggcttcttcacccttgcaacctccagggattacttccttccccaaagacccagggcatgcatagtctcttctccaaaacctagggcttaattaatgaacaatacaggcagatagaattatttctggtgtgctagtcctcactcaactccatgagttcctagaaagcgaacactccctgtgcctccgacaaggctgttaaagtaagttactttacaagtgtgcctggcacattacaggtgtttcataaatatttattgaatttagttattgttcggcccaatatttcaacttaaagtcaagttttttgagacattgatttgttcttcagtacaatttattctctccaatggctggagagacacttttatgaagattaacaattacaagtaccaccaattttaccttgaagaaaaagaatttatttatgattttaccatgctcacttcactaaaaatagctaaactctaccatattctctgcttatatataaatacttcaaaaaagagatcagaaccttgaaatcctttactcaaaagcaagagataaccattaatacaaaaatcttgccaattctttgtctagaaattattggctggcaaacaaaagtgattgttttaaaagtaaacagcaaatccaagaaactccaccaaatacagttatttcaatcttgctcttgattcattgtccttaactattttactaccatatcttattttatttgagtgattaatcatcaatcaaatttcaaggctcccctgtggcctcataacctgccaattaggaaaatgaaatatctctgttgccagagcttagatccatgaccttctaaagtatgtataataaaaaggggtcatgggtcattaatgacaaatgggctttgtgatggatgactaaaaccagagaaaggacaagataaagcaaaaggagaaacgttttagaacttcataaaaatagaaatgatataaaaatctagaaatatcttcaatgacattagtcacaacaccatgctatttattatattatacatataaaaaccattcataggttttctacacactgttgagaaaagaaaaggtggcctttatttttcgctaaaaataaaaaacagctagcatggtgaaaaaaattaattacatagcctgtatcagttgtgcctacatatattagtgaaagtatacaggtgttggcatttttgccctgttttttcttccatgatacatattttaacattctaatgaagaggaaaagcatggagaccaacctgctgccccaaggagtagagagcgagggctctgcacaagtgacctttcagcttgtgagaagactatatgttcctgtgaataaactcacagaggctgcaaaccaaacaatgctgagatccttggacaaaaggaaggcagaggaggagaaagggcaagagaaattgacaggcctaacagagaagggtcccttctgtgggcaaatctgtaatacacaaaaaataaaagcttttacagaaattgtccttggtatcaatgtaactagctttatgaagttcaataagtatgtttaataaaagatggggctccatttctttcagattttgaaatttttcatactttttctttttctcccatcttacttcgtttgcacttattttcagttcctgtttggttggcagaagagtggagacattaattgattggagggcaaaatccacaatacttggtaaagacaagaaaaaaagtttttggaattttgacatgccattgtgacctaaaattttcttttcttttcttctttttttttttaaaggcttccaaggattgtcaagggtcccatttctccagaccataaagaggaaactcagtaatcccgcacaagcactgttttgttcagagggcatggtgaaatatacattatgttctatatatgtccttaattgacaacatttaatttttaaaaatttaaattgcaaaacaataccaacagtcaatgtgaaggaatctcctctttaaactggattttaaactgggtgtttctttttttttctttttgtgagacagagtctcactctatcacccaggctggagtgcaatggcacgatcttggctcactgcaacctctgcctcctgagttcaagtgattctcctgcctcagcctcctgagtagctgggattacagatgcccgccaccacgcctggctaatttttgttttattagtagagacatggctttacaatattggccaggctggtttcaaactcctgacctcaggtaatccacccatctttgcctcccaaactgttgggattacaggcatgagccattgcgcccagcccggatgtttcttttaaaaatacacactccccacacaaaacaaagactggaattcatttttactttgccaattgcaaattattaaattgcaaacaatccaagataagtgtttcagggtgcccatgatgtttcctcacataggtaagttcccccagtgacatgtacggtgactttttcattattcattcaacatatatttactaagatcctaaggtgtactggctactattttatgtgttgggatgcaaaatctctggcctgtgcagcttaaacttccactggggagagacaagctaaataagaaaattatgcagtatttaaaaagtggtaagtagaatagaaaatgaaaacactacagcaagctaaagcaaatcaggagtaagtggtgaggaggtgaaatttaaatagggtcagcagcttagatctcattaaaaggtgacatcagaggaaaaacgtgaaagaggtgacagagaaatggacaaacagacctagggaaagaaggttccagacacagggcacagccagtgcaaaggctgatggcagaagcaatgcctggtgtggtcgaggctgggcacaggggctgcagagctgagttggggggtgcacaaggaaagatgaggccagagaggcagcaggggtcatgtccagtagtatgttgcgggtttggtttgttttcgtttttggtaagaatcttgctttttctaagaggagtgggttggtattaaagttatttacagtgtcatgatcttactttcattgttagaggatcctctgtttgctatgttgagaagatgtagcaccaaggataaaagtagagagaacaggaggctctcacaatatccaggcatgagaccacagtggcttgatccgggatagaactagtggtgatggagggaaggggtccacttccagatatattcagaaggtagaacaaacagggatctcccgatagattagatgtagggtatggaagaaaggaaggagtcaagcataacttcaaaaattttgacccatgcaagtgaaaggacggggctgccagaaactgagatgaagcaagtccaggctggggagaagagcaggcaatcagtttggaaaacattaaatacaaaatacttcttttaatatatctagtggctagaaccaagtaaattcaaatattctctcagtcatccaaaataattagctatgtacacacacacacctctttgcctgtgaatattctcatttctctgcctaagatgcccttttacctcctttcagtctggcaaacttctaattattttccaagagccaggtcaaaaaccacttcctctgtggtgattttaacaactttcctaggaagaggtagccatggctacctctgttcttcaacagcgtttggtagctgctgaaactccagcacccaacccatactgcactgtaaggttttgcttgcaggttcctctttcttctgaactgaaaatccataagctccaggtgcatggatcattgaggtgtcccctagtgtattaattaggataagtcatgcctgtcatgtacatgtttgctgaatgaataaataaacaatactaatatttgccaccatctttcactttttcaaggcattctgacttattacctcattttctctccataataatcctgagaagaaagggcagcattgtttatgtcagcagggaaaatgaagctcagagagcttgacttgcccaaggtcatgttatttcatggcagactgatctccagccaaagcctcctcctgtctctttgtccagtgctttttccactagaccgtgccacttccactgccacagggtctggtcatgctgccaacatcagcaccctccctgccattacatacatcttgtgtttgggaaatctagaccttgcatggcactgtggcaaaggcttcagcagctcctcaacaattgactactgtctttagttttgatcatgattcataattcctgtcaaaagagcagaggacagtaatggcatcaaattcacaggactggctgggtgtggtggctcatgcctataatcctagcactttgggaggccgaggcaggaggatcacttgagctcaggagttcaaggtcagcctaggcaacatagtgagacttcatctctacgaaaaaaatacaaaaattagccaagcacggtgacatgcacccgtagtcccagctactcaggtggctgaggtaggaaaatcacttgagcctgggaggtcgaggctgcagtgagctaggatcatgccactgcactccagcctgagaaataaagcgagatgctgtctcaaacaaataaaaatacacaggttatatatttttaaaagcataacccaaaatgggacaaggcattatttccaaaagttagttttaaaagatttattcagggctatgcaagccaaaccaaaaggtagaggtaagggtaacttggcttttgtgagtcaagctgttttaagtaccagtcacttctttgcccaacctgtcaaagttttaaagttatcagataggtgcaagttccaaaggttagcaggggagggaagaagacaggcaatgctgctaagaaaggtattcaggattttagtggacagccacttgtgttagcagttgctggatttgtttggatcactgttttgcatggattgtccttacagaatgtttaccgtctcaaccactaaatctttatcctatgtccactatgtcagctattctacaagctttaaaagaggataaggaataaagaaaaggttaatgtcattgatcctttaatatggattacttaaaatgcaattaatggctatttccactgactcttcagagacaagattagaatcctgtaaattatgccaaatcatatgttcttcttgttcgaagaattggtgtaacaagactatggatttctacgaaacagtaagcaggagcataagcataagcatctttgctccaaccctaagtggctagctggaacaatggaggattctcaaagttataaaaaacccagtaaatggacatgttgaaaatttgttgacatactttgagtatttagtgtgcacactgaagaggaaatcgaagtgttctctcacactgcaatacagacatggggaaaaaaagaagcagaaaaactggagtcttgggcgaggtggctctcgcctgtaatcccagcacttcgggaggccgaggagggcagatcacttgagatcaagagttcgagaccaacctggtcaatatgtgaaaccccatctctattaaaaatataaaaatcagccaagtgtggtggtacgcacctatagtcctagctactaggaagcatgagacaggaggatggctggaacctgggaggcagaggttgccgtaagcaccactgcactccagcctgggtgacagagtgagactctgaaaaaagaaagagagagagagagaaagagaaagagaaagaggagaaagagaaagagaaggagaaggagaaggaggagaaagagaaaaagagaaaagaaaaactggactctgtccattttgtgttttggcccaaagataaaataatttcaaccaaacgtttcctgaagtacccataagcaggcctaatcatacttggagcaagagtgcaaatggaggctctctttgttcccacccatcccagtcctgcttctgtgcttctgtgtgtagaatcccagcttgaaggtccaagctttccaagcattgtcttccatatcccctcaactcccaataccttgagattgcacgcccccaccccgcaacccagctacctcctaactacccctccagcctgtgggtgtacacacttgtagcagtcagtcctctgagacccattcaggtcttggatataggctctggctctaagacagggaatcccagggtctctagtacctggatcaaggtctagaaaattgctccccaaagtgtggtttgggagaccagcagcactgttatcacctgagagattattagacatgaacctcacgttgaaatttgatccccaatatgggggattattggccccaattattcaggcctaaaggaaggtttctgggtcacaggggcagatctctagtgaattggctaatgctctcccttgggatgacttttcactgtattagttccctcaagagctggttgttaaaaagagcctggtgccttccccctaccctcttgcttgccttctcaccatgtgatctctctgcacatgggagctccctgttgcctcccaccatgagtggaagcagtcaaggccctcacctgaaactgagcagatgccagcaccaagcttcttgtatagcctgcagaaccgtgagccaaataaatctctttactttataaattacccagcctcaagtattcctttgtagcaacacaaaatggactagaacatcatgtatgtgtttcaaatgtattcctaggcccatccattctgacgaatgagccttcacaaacacacacagtgttatgaagggaacttctggcataatggagtgaggaagttgacaaatactctccctagatagccatcatacaacgggacaaaactgtcaaaaaatcatttgattgctctagtaattgaccaaaggcactcaaaaatctgaacagcatttatttatgacaactattgaactcagggtcacaacagtgagtctgtggcagtgattttgcctgcatctgcttccatcccacaacccccatccccggctctgtcattaggtaattcactcaaccagggcaggacagactgtgaaaaacagcagcttcactgcacctgccaaaggaggctcacttgattagagcattcacagtttaagtttttactggaaagcaaacaagaacaccagcagtttagatagactgaaactgtttgtttggagaaaacaaaaaactagtggatcaatcagagatttatcagagagttccagcaggtaaaccaaacacagagggctagaaaaagtgcttcacatatactgagttgaccagggccacacaaatgtgtagaagagacctcaggggcctaagccacctacatacccatggccaatggaatgtacacacacacacacacacacacacacacacacacacacgacacaagagaggacagctgaatgtaagagctgggagaagacttgaaaatgacataaagtttgaatgtactctccagccacacacaaaaccatgagcagagagtggaagccttattggctggaggtatttgagtccaacttttggtcagttattgactgactactgaactatgcagacacaggggcaaaccttaagaaaccaggctaatttttttttaagtaaaaaaagaaactgagtggagacatcagcaattgcacattgcagggaagacatgccacagatttactacaaacaagttactaaacaaacaatagcaacagctacaaatttctcagggtagagaaaagcagaaaccacagttaccactacatatctaaaatgtcagtagtcaataataacaacaaaaattacgagacaagtaaagaaaaagaaagtgtgactcatacatggtaggaaaaaaaaaactatcaatagaaaatgtccctgagcagtcctaaacagacttagcagacaaagacttctaatcagctattataaatatgttccgaaactaaagaaaaccatgtttaaaaattaaaggaaaatctgatgccaatttctcaactaatagataatctcaaatttttttaaagaaaacaattgaatgggaaattttggagttgaaaagatcgatacctgaaatgaaaatttctctacaggcactcatagcaaatttgagaaggcagaagaagaaattagtgaactagaaaacagatcaacagaaattatctaatttgaaaaacacaaaggaaaaagttttaagaaaaataagcagagtctcagaaacccatgggacaacatcaagcacaccaaataagtaccatggtagttccaaaagcagaggagagggggagaagagtgggtcgaaaaatacttgacaaataatagttgaaaatctcccaaatttgatgaagcatactaatatacagatctaagaagttcaacaaacactagtcaggaacaacagacactgggtcctggctgagggtgaagagtgagaggaggaagaggaaaaggaaaatggttattaggcttaatacctgagtgatgaagtaatcggtacaacaaacccctgtgacacgacttcacctatataataaacctgcacatgtacccctgaacttaaactaaaactctagtaagataaacacagagatctatatctgggcacatcaaagtcaaactgttgagaatcgaaaggcacagtaaatcttaaaagcagcaagatattggccaggggcggtggcttacgcctgtaatcccagcactttgggaggccgaggcgggtggatcacgagggtaggagatccagaccatcctggctaacaaggtaaaaccccgtttctactgaaaatacaaaaaaaattagccgggcgtgttggcgggcacctgtagtcccagctactcgggaggctgaggcaggagaatggcgtgagcccgggaggcggagcttgcagtgagccgagatggcgccactgcactccagcctgggcgacagagtgagactccgtctcaaataaataaataaataaataaaaaataattcgctcacacacgtataccacccttcctctctcccaaccttcaattgcaaaatggatgggctacagagattaaaagattcttcagaagcagaccaaccagttgcaaagtgtgagttttataaagattctgaataagatgtaatgtaaaaccaagaaacaaacaaatgtgacataaatgagagaattttgatattgattagatattctaatatagaaataatttatttttaattttgtttatgataatgatgtgtttatgttccaaagagctgtggcctttaagagatactaaagtatttacagataaagtgatatgccttcaggaattggttgtaggttaatttcttgggaatagattccagattctttatgaatttgcatttattgaagcaaggtcatgaatacaggggagctgattttctattctctctgcttttgcatttaaaaaattttttcataacaaaattttagtaaagatagtatattcagctcactgttcacatcacaatgtttaaaaaataaaacactacaaatactttttaaaaagaaagcagcaagaaaaaaatgactacctacagtgaaatgacaatccaaataatttatgacctcttatcaaaaataaggggaggcaacccttgcatacactgttggtgggaatgtaaattaatacatctgatatgtataacagtttggaggttcctcacaaagctaaaaataaagctactaaaagatccaccaatcccactgctgggtatatacccaaaagaaaggaaatcagtatattgaagagatatccgcattcccatgtttattgcagcactgttcactatagccaagacttgaaggcaacctaagtgtccatcaacagatgaatggattaaaaaaatgttgtactcatacacgatggagtactattcaaccataaaaaaggatgagatcctgtcatttgcaacaacatgggtggaactgaaggtcattatgttaagtgaaatcagccaggcgcagaaaggcaaacatcacatgttttcacttatatgtgggatctaaaaaatcaaaacaattgaactcatggacatagaaagtaggaggatggttaccagaggctaggaagagtgggaagtgggggaaatgggtaggggagaggtggagatggttaatgggtacaaaacaaatagaaagaatgaataagacctattatttgatagcacaacagagtgaatatattcaataataattttactgcatatcttaaaataactaaaagagtataattagatagtttgtaacacaaaggataaatgcttgaggggacagatgttccatttttcatgataagattattacacattgcatgcctgaatcaaaacatctcatgtacctcataactatacacacctactatgtagccgcaaaaattaaaaatttaaaaacaaaacaaaaaacaacggaggcctgaaggccgtagaataaaataatcaaactactgaaagaaaaaaatctgtcaatcaagactatatcccactatgatccttcgaaaacaaagcacaaaaaaaacacatttccatgtaaacaaagattttataaagcaatacttagagcactaaatggagtattcatacatatgtaaatgtaatataaatgacaataatagcataaaagagtgggggaggaaaaggagatgtattgaagtaaagcttttatattttattagaattaagttagtattattctgaagtaaagtaaaataagatgcacattataatgactagagcaaccattcaaaaatagttcaagaaaaaaagaataaaaacaaattactgaaaccaactcaaggagacatggaaaatccaaataggcctataagaagtaaaaaaaaaaaaaattaattaattaattaagaatttaaaatattcctaaaagaaaaattcaggcccagatggcttcactggtgaattctactcttccacaaactttttcaaaaaacagaagcgagaacacttcccaacacaatctataaggccagttttactctggtaacaaaatcagaccaaggcattataagaccagaaaactacatatcaacatccctaaggaacacagaagcaaatatcctaaaatattaacgatctgaattcggcagcacataaaaagcattgtacaatatgaccaagtgggatgtattgcagaagtttaacatccaaaaatcaattaatatactacattaatagaataaatgacaaaaatcacattatagttttaaaagatgcagaaaatgcatttaacaaaatccctttcatgataaaaaaaatctcaacaagctagaatagaagtaaatttctcaactaaataaatgacttctattaaaaaatctacagttaacatacctaatatgaaagggtgaaagctttccccctaagattgggaacaacgtaaggatgtccactcttaccacttctattcaacactgtattggagcttctagttagtacaataaggaacataaaaatcaatggcatcaaaatcagaaaggaagagtcaaaattgtctttattcagagatgacacaaatgtaggaaatcctgagaaatccatttttaaagactactagaattaataaacaagtttagcaagatacaggatgtaaggtcaattttctttctatacatcactaacaaacgatctaaaatgatatgaaggaaataattccatcacaatagcaccacaaaaaataaaatactttaaaataaatttaacaaaaaaatgcaagattttacatcaaaaattcaaagcattgttaagagaacatgaagaaaatctaaataaatagacattaaatgttatgaattggaagatttgatattaaggtagcaattcttcccaagttcatctattgatttaatgtactacctaccaaaatcttagcacttttttccatgaaattaacaagttgaccttaaaatgtatatggaaaactcttaagagaaaacatgtgagtaaatttttgtgaagttgagtgaggagataaattattagatacaacaccaaaagcacaagcaacaaaagaaaaaacaactacattgaacttaacaaaatgaaaaactttttccctcaaagggcatatcaagaaagtaaaaagacaacccacaaaataggagaaacatattcacaagccatatatttgataaggaacttgtatccagaaaatatttttacaaaacaaactcaataatcagaagataaatgactccgttctaaaaaccggcaaaacatttagacatttcaccaaagaagatacaccaatagctatgagaatatgctccacgttattagccattaggggagtgcaagtaaaactaccatgaaataccactccatggtcactagaatggacataataaaaaagacaggcaagccgggcatggtggcttacgcctgtaatctcagcactttgggaggctgaggcaggtggatcacctgaggtcaggagtttgagaccagcctatctctactaaaaatacaaaattagctggctgtggtggtgcatgcctgtaatcccagctactagggaggctgaggcaggagaatcacttgaacccggaggcagaggttgcagtaagccgagattgcgccattgcactccagcctgggtgacagagcaagactccgtcacaaaaaaaaaaaaaaaaaaaaaaggacaggcaatactaaagattggcaaggatgtcaagaagctggaaccctcaggcattcctggttgggaaagtaaaatgatacagccactttaaaaaatagtttggtaatgtcttaaatcagaaatataaatataccatacaagccagcaattccactagtatctatcaaagacaaatgaaaacatagggacacataaggacttgtacgctaatattcatagcaacattattaataatagtctcaaattggaaacagtccatatgtctatccactggtgaatacgtaaactcaatgtggtatctacataccagggaataccactgatacgtgttacaacatggagaaccctcaaaaacattatgctacctcaaagaagccagacacaaaagattctatagtatatggttccattaatatgaaatgtccagaaaaggcatataccttaataaagttgtaaaatatattttacaacaaaatgttgtccatagtaccataattccattttttaatttgggttacatttttttttcattaaatgaattaagccgaggacttaaggaactgatccaacagaaaaaaagttttctacattcatcaaccataccctttataatttgttacaccaattaatttacagtaatcacttcagacacaagaacacagcagtcaacttttccattagttgggttttactcctctgtcagctttcttagtaatgaatggaggctcacttacattcaaagatttcacacttccaaagacaatctaaaggtaactctactgattgctctgctagggagtggctccattttgagcttccctcaaacaaagtatgagcaaaaatgtttagtcacatgaagcctccattttgccagctgcacacttccaaaaatttattcacccaaaggtcagaagcggtgagttctggagttctttatggtgtcctgggaatgcctttcaagtctctggctgctcacaatatttttgtgtgtgctgaactgttatctaaaacgaagtatttcctaatttcagcctactctgagaaccttcagcttttaaagagcttgctgtataaaaaacacaacaggcctctgtaattctacttcaggtgcgatctggacaccatgaagcactgcaaattctctaaggggatgcccgttaatgtcaactggatggttatcttgtaggtttgttgttcttaagcccaaacttaactgttaccatggaaataaaacacaaaaggagttgtccatcctggaaaataaaaacctttagaattctcattcaaggagttaatgttaaatatgggagaaactcttctgcataatgtttttgtgaaaaataaatttttttccttgagaatatgcaaaagttatcttactatgtaacacttggaccccccaacatataaacaaaattttaaaactaataatgtacataattttaaaaattagggtcatttgctttttgcaatcctattgactaaaacagccacaatatcagattgctcaaagaactttagaagcttttttcaattagtcaaggatgcaattacattacctgaatgtgctgtagattagattagactatctacactttcctaaatagcatcttcaggactcagttctctatacaacattccccttagaagtttgggtcataactgtaactctcaccatgcagaagctaaaagtccatttccttgttatatatcatagtaggatgacacagtaatgtgcaggaattacgactgagggataagggtcaaattccttgggttagaatcctagctctgcaacttagcagctatgttattttaatcagctaaactccctaagcctcagtttcctcatctataaaatgagtataatagcataaagcagggttggaaaactttgaccgtgggccaaatctggcctgccgccaattttgaaaagaaagttttacatggccatgcctgttcatttacatagtgtctatgagaatttttggagatatcaaatagcctaaaatgcctacatatttgtactatctcgcccttcatagaaacaatttgctagcttctcatataaagggtttttgtgaagattaaatgtgatcattcattaaagtgttccatataggtaagcaactaataaatggcagggattattgttatttattaatagtaataagttataaaaatcattgtgatctcatttcctaaaattcagagagacaactttacatataatacctcgggagcaggctgcccatacagtaataccttgggatcagtaggctcagccccctttttttgatgaattggtcatggaggtggctgaggtggtatgatcacaggatgtgatgtgcagctgtcagtgcagggcagagagcccggtgagtcacagacagcagctgccacgagtcatccattccaagtaattgatactctgccattctgtgatggaggatctcttggtcacaggtgtataacacatgcatattcgtgattggccccactcctaactgtgtagaggagaccaaagagggagtggggagggctggaattatgcttacacgatgaccagagcaggtgcaggtagccacaacacagcctatttccattttccaggcagtaactggtttcccaagatgtattctgttgtccagaacagggaataagatggggtggtctagtacataaaattctaaaatgtgagtttgatgtaagaaaatatagattaaccattcaaagtagtaaaagctggtgattaccagctggtgatttaccacagaactggcatcactggtcccatgctagtacatctgcaaaatgactttggtcaatcaccaaatatgacagtgttatccacaaatctttcaaactgtccttagaacaccgtctttcaaggcaaatatttaaaagatctaaagagctcatactgaaacagtgatattcagatacaaactatcgcctgtactctctgctcctgtctagggccttaaacatgtcaatcaattttcacctcacttccttgtgtgttaaaaagaagctgcgagaatatgcataataaaaatagccataattcaaaattgtttcctgctggatgttggtagattctcattagttgtagttgctcctgtcaggatcataaataaatttatgtctgtagcacggaaagaacatattcaccaggaggaaacctcaaattggcaaatggtccatgtattaaaatgagatcagtgaatgacacaaactcagaattgtaaagttctcagtgttcatcccaagaatcttcctaccaaacaatctcgttgctattatttaaaacaattagaccttttttttttgtatgtcacagttcattaaatgccatacacatgacattaataggtaaggtcatttccctggaggagctcaccatccaagacagacaaggctgccgctggtgggaatgaagaacagacattcacaccaaatggggagacatcataaaggaccagctgaaatggttttagagttcacagtatattcaaattaatattcaagttgaatcaaagctcttgacaattctgtttctccaaatagacagtggtgctgcctgattatagctagctgcaaaattctccacaatgccatttttaccctgccccactgaaggctgaagttgtctaagagatagctcattcaaggctttgctttcctcagcttgagtaaacatcagcaactgtaacatttttcatgttgaaagaaaccttctgactacacagccttggcacctgtagagacttaaacaaaatatgtgcccttaagttaccaggtgatgaaaatttacacttgatggaggcagcaaagttgcagctgattataatcgaaaaaggtaatcaactaattaaactaccaacttcaaacatttgtccaggtaataaaattaataccctcttcaccactcccagcatctctgtgccttaattcaaggaataactttctaaatagccaattattatatatgtattcctttggtacacaaagtatacagatatagatagatagatacatacatacatacatacatacatacatacatacatagatacaggtgtaggtatagattcagatatagatatagatgatgagatagagagagagagagatagggatacaattggccttctgtatccctgggttttgcatctgtagattcaaccaatcactgatggaaaatatccttaaataaataaataaataaaacaatgcaacaatttaaaataatataaattttaaaacaatatagtgtaagaactatttacatagcatttacattgtaatctagagatgattttaagtatatggaaggatgtatgtaggttatacgcaaatactacaccgttttatatcagagacttgaatagcctctgattttgatatcctgggggtaagggggtggtctgagaaccaatcttccttggatactgagggatgactctatagacatagctatatgacacagaggtatgggaaagctgtattctctttttttttggtaagaaataggtttagaaacagatgaactattattgtattctgtattagtttgccggggctgctgtaacaaagtaccacaaaatggaggcttacacaacagaagtttattatttcacagttctggagacaggaagtccaagatccaggtgtccgcagggttggtcccttccaagggctgtgagagagaatctgttccatgcatctctcctggcttctagtggtttgctggcaacctttggccatttttggtttgtagatctctgtcttcatttccacaggccttcttctactctgcctatctccaaattgcctctttttataaggacactaatcatatatggattggggcctaacctaattatctcactttaactataaagaccctgtctgcaaataaggccacattctcaggcactgggggttgagacttcaacatatgaattttaaaggacataattcaatccataacacattcccatttctaaaattctgtgtcgacagagtccaggtcaataatgattacaatttttaatctccatctcttcactgaggtgcagaggaacagaataaatgcaaaatacctcaactgtatatacaaacctgctcacaagccacactgcatgtatctccctttatttcaaacttctaagtacatgcagtttgtaaactagatgaatttaatatattaaaatggtttcatgctttattggtttatggggttgctagttagtcatgcctgacacacaacaaaattattgactgtccttttcaaaaatatgaatggattatggcttgaaataaaatacaattagatttatggacattgactgcaactgaaaaataaaaagttccttctcagaaggacacactgccgacagctttgctgactcttattttatcatattgactcaacatgactttaacatatatattatcattttttggagagtaaggttataatttgtgttttgagaacagtcctatcctgcagcatcaacaagggtatcaatctccaggctgcagtgcaagaccacttcatttattcaaaatcgagtagccacatgtattgttaagaatacatgatacatacgtatgcctcaagcatgtttttggtgcaaaaaatgtcaagtgcattctacctaataacacagatttacgtcatctttctctcttagcactttcatttcatcatcatttgttacagtcacatacccctgtgatgtagggttgggtggtgacaaagattttgtgttttatctctattttctaaataaagaaaagttacttaagtaacttttccaaagccatgcagtgtatgagctttcttaatctatgtgtagtagcctagttcttctcaaattttaattaatcaaagatgttacataactttttattctaggtgtctctaatatggcaccactgccctgaatccaacccctataacccactaactagttacgaaaggccatgctgtagttcaactcacatcttaagggagaaagttccatttttaaagctacagcatgagagcttctgatctgtttcacaaaccagtctcttcatttttcatttcagttctgtgtgcctcacttctgatttcttcaaattcagagggtagaaagcaatctcagaaagtgcttaactcagtcagtgtgcagccacccagagacctccggaggaaaatgacaagcaccagcttcagacagtgaagggaaaggaaagccacgtgcaaatctggaatcatctgccattagcaaaggtagaaaattatagaggaactctttggggtcacaaggatgtcatttagacctccgcagcagaaattttttaaatagtacccttctggattcaatgatttcacctgcttgctcaagtgcctaatttagaaccagcaagcaaattacaatctacagagtccaggcatgaaattataaatgtttggtttctcatggtctagatctatctatgtcttcaaaccagggctgagaacaaaaccccccaattttccccaacaaagatccacctgacattctgacattttgcaatattcatgtattcagtcattcattcttgcacacactcatttatcaaatttgggggctctcagatacataccaccatgcataatgtgaagagcagctcaggctcctcgcagaacagagcaaggatggtttccgaagttaggagacatggagaaagctgactaagataagcaagggcccccaatgcctggatgactagttatctgcttttctttatcatgcagactcggcccctcaatgttatttagagcaaatatcaaatatttttatacaatcgtatgttctctctgcatttacaacctatgtctttttttttttttgagatggagtctcgctgtgttgcccaggctgtagtgcaagtgcatgatcacagctcactgcaaccttcgcctcctgggttgaggtgattctcctgcctcagcctcctgagtagctgggattacagacgcccaccaccacacctggctcatttttgcatttttttagtagagatggggtttcaccatgttggccaggctggtctcaaattcccgacctcaagtgatctgcccgcccaggcctcccaaagtgctgggattagcatgagccaccacacccagacccacctgtctacctctttactaatttttattcagccttatttgcttaggtttcacttggtatctatttgctctttcaacagagtctctacttagatatttctgaaaaatttttcatgaattgaactttgatacattacagcagctcactcatcatataatccttatgcaaagtgaagaatcctctttgatgtgaacagtcaccccatatgggtttgccaagttcacttctttctttttttttttttttttttttttttagacagcgtctcgctctattgcccaggctggagtgcagtggcacaatcttggctcactgaaacctctgcctcctgggttccagtgattctcctgcctcagcctcccgagtagctgggattacaggcacgcaccaccatgcctggctaatttttgtttttgtatttttagtagagagggggttttaccatgctggccagggcgctcttgaactcctgatctcatgatccgcctactctgtcctcccaaagtgctggaactacaggtgtgagccactgcgcccgaccaagttcacattttcatatgctaactttctcaagctagggccacctgtacataaaggaacaaaacagctggaaaatagagtggatttggctaggaatttaagcatgttacactgaaataactttagctttcaattcttagtaaattcttctcaatacatttcttttaaatgtaaatgtcttatcatatttcatttttgtaaggtgacttatgagttatttctattttatgatgtcaagttactgcaatgacccaaagtactacagtaaaatatccctagaatatttcgtattgagtgctatgaagtggagactattctccattagccaggcaatagccataaaaacttttattcttttccctttctctttctttcaaattttaagctattacctttagaggtaatgagtctgatcatgaactcactccctctctgctgtttaatgaaccccctcatggttttaggacagcagtgaacccttgacatctatttaccttccattataatttcacatcacagtaactgttactagaaacgtaaacataaccatggagttttttaaaccccagcacatctattaaaatgaaatttaccttaaaattcatgaaacacacaaggtatatatcatgattcatgtaaaacacaacatgtcgtgtaagttaatataatcattctgaagtaaattagatgttgttcacattagagtatttattatgttggaatttccatgttactaactgttcaaatattgccatgtcaatgttatttccctaaaagtagaaatattcatttgaatgtactaaatatacatttacaaaaatggcttttagccatcatgctactaacatcagaagaaaagactatgtcgagtcatttaagcagtcaaagatgcgaaagcaaaatttggtgatgtttcaactttcaatttttcagttttcaaatactacaatttttccatttccaatcgcagttttacagaataccaggaagaatttcaaattacccaaaattgctttttatttcacttattataatacattctagtaccctctacctcctagtagctgcttttattattctagtgatgcacacactagaaaacgtttcctactgaaatgttttcaatcagatgctgcctaccaaaatgaatggaaaaccatgtgccatatgaaaaacttcgagagtaaatataagagtgatggactcccaccgggagcagaaagccaaaatcacacttcataaatatacttatctgggaagaaaaaacactggttagacaatatttaggacagatgtatcttgttgcacatcaaaacaatctgtggacaacaccacaacactgcgatgcaattttacaagggaagctggttgggcatttctgtatttattcaactagataatagaggggaaagccgcagaacagtcagaagaatatttgcaatgcaattagggggaacaagtgcatctgagtgagcgccagacacaggggcctccccttaattcacacagtccaatgttttaatgcagcgtacagcagcaaactgaacttcctacagttttaaaacttttgtcagttaactagatgtttaccaagtgcctcgcttgggcactcaacatttcgggtgtgccatccagctctatgtaggttgttccaacaccatctgtcacttaagcttccacagattcacaaatttcaattcgaactaatctactcggcactcaaactgaagctataattcaaatttcaacatgaagcttgaattccttttcagtgttcttcaactttgacccagctcccccctcccttcactgaaaagggccaagacaacagcccagcaagtggggcaggcaaaacaggcctcctttgttcacttttgtcctttcagctctctattgaggtaagggactgaaaaggcacaccaggttttggaaggcagcagcggactcgctcgcaagccatccttcctcaaagaaccaaaaaactccaggacaaaactctttggacaggccactcttaccttaaggcataattaatgggagattagtacttcccctttcccttgagagagaatctgttagtggtgttgaatatgagtctgtaaatgttcatcaaaaatgcatgccataaatcatgccattcaaatgccaaggacatcaaaaagtggcatgaaattagctttaaagttgaaatttggagaaaagatcactacatgctgaatactcatactgaattttttgaatgctctcagcccacttgagaaagataaatcaaattcattgcatattacccagtggaagacctcctacaggattccctcagattgccctagaaatagattttttttttttctggttacagtgggttttgaaccaacacactatgcacataataaaatttaaacatatatatatattcaacatatatatattcaaaatatagtttccagcccttcctaccattatttaatgagaagaatttcaaaaggatcatttttgcctgacagtacctgtcattttcattctcatgtgaattaaaccatgttttagtccagggcaatatggaagaaattcggagagcacataatacaagtaagattcatcattcctgtgttcgaactgaatatgccattaggacagtatgtgagtacaggagcattagtggttataatttgttccctttaccactggcttttttttttttttatcttcactagcttcttagtcacttgatggaaaccctccatcagactgttaaaaattacctttttctaatttgaaattccaatcttgtaggccagtaaaataggtcaattaagttgacaccacatcttttttattagctcagctaagcaattataattgggtggtgaaggtttatgctgtcatcttggaagattcaatggtagggagaaatgcccaatgtggaactataatttacaatgccagtacatccctaaacattcagcataagaatatttctattttcagatatgaggcaaatttgctcttgttctagattaaaataataatgccattttttggcagtaaaaaaagcatatttatttaacttatcctcatagcaaaatcatttagcacaagtgtattacagacataggtactttaattcaacattttagaaaaataccatgaatgtatgccatcaatgctggcttatcctggacttggactacaacacatatgctccacaacatcaatttcttgctttgcacaaagtatgtaatcaattaatacttgttgaaaaccatatacctccatattaataaatgttaaaccaataaattagaaatgctgtgaatgacttgttcagaatatatagatattaatttacagctttaaaagataacagtggctgggcgtggtgactcacgcttgtaatctcagcactttgggaggccaaggtggatgtatcacctgaggtcaggggttgaagaccagcttggccaacctggtaaaaccctgtctctactaaaaatacaaaaattagctgggcatggtggcaggtgcctgtaatcccaggtaatcaggtggctgaggcaggacaatcacttgaaccagggaggcagaggttgcagtgagccgagactgcagcattgcactccagcccaagtgacagggcgagactccgtctccaaaaaaaaaaaaacaaagaaagaaaaaaaaagtaacagtgattgcacttcaaacctattaggatggctattatcaagaaaacagaaaataacaagtgttggagaaaatgtggacaaactggaacccctgcgcattgttggcagaaatgtaaaatggtacagctactatggaaaagagtataacgatgtctcaaaaaaaaatagaactaccatatgatctagcagtctcatttctgggtatataccccagagaattgaaagcagtgactcagatatttgtacatccatgttcatggcagcatcatttgcaatagccaaaagatgaaagtaacccaagtatatatgacatatgaatggataaacaaaatgtggcatatacatacaatgaaatattattcagcattacaaaggaaggaaattctgacacatggatcaaccttgaaggcactatggtaagcaaaataaaccagttacagaaagacaaataaatactgtatgattccactcatatgaggtacttagggtcatcagattcatagactggaagtaggatgtttgttgccaggggctgggggctgaggggttatgaactattgtttaatgtgtacagagttacaatttgggaaggcaaaaaatgttctggagaggtatagtggtgatggctgcacacaatgtgaatgtacttaatgccactgaagtatacacttagaaatagtttaatggcatatcttatgtcatatatattttacaataaaaaacttagcaaaaacattttttaaataaacatattgcatttgctgccccatttaaagacaacctgataatgaaggatttacagttgctgacgctgaaggctgagccattcccctatttccttcctcaggtagccttcaattttaagagaaaaaataaaaatttgtcaattcattttggtacatcttcctattcttagaaacttcagtcaaactcatagaagcagagagtagaatggtgattgctagtgggtaggggaattggggagatgagatgttctcaccacacatacacaaattaactgtgtgaggtgatagatgtgtttattagtttgattgtggtaatcatttcacaatgtatacatatatcaaaatatcatgttgtacatattaaatgtatacaacttttacttgtcaattatatctcattaatgctgtgggggggggaagaaacttcagcctttgatcccaatagaggctgttttaaacagaaggagcttttcatttgccaaggcagtaaaatgtttaagtaaaataagtcactggatttttgcccttagcatccagttctctcctctgtcctcacctgccaggaaggttcctggaagggatgcttcaggtagggaagcataaaattttaagggaaaagcatatctaaatgtatttagtaattttcaaatcacttcctcttcatcaatcattgcaacagctgaagactgaagtaaagcagtcttttgattcaaatgcacaaaacttcctaaagaatatgttagaagctctacattccagttaaatttgctatgggttaccgagcttctcagatggtaggtactctttgaaaatgaggatgagattccaatagctgctgatctatggtgagaatataaggaaaaagcctcagtgcctcagtggttaccctttggggtgagtaatgactggaagggaccacaagagggctttctcagatgtgcattacactgttccttgatctgagtgctagttaagtcaatgtgttcagtttgtgcaagttcatcggctatgcatttgtgatatgtgaaaaaaactctgtgtgatgaagtatgtagctagatgataaaattagaattaatcttcccaaggacagatattctgtttggtcaccactgtatccccactgcctggaacacagtaaatatttattaaagaatgaaggaatgaatgaatgaaatctttttaacggaaaagcttcctgtagagttccattcaacagctcctatgtacatacacaatataatatctgtagagtctatttatattcaatctgttacacagggaaaattacacctgcatgaaagcattatttgaaatgattcttgaaattttctacagcccaggtgtatacattctcaggaccccctcacacttctgaagcacttacacctagcgattattgccatcattgttgtattggcctcacaggaagtactatttccaaagatgctttgctttctattcactgttaccgtagcattaacaaaaatgatgtggtgtaagggcaatggccttcagtccaaagacctcatcactaccctgcattacgaggctgagccctattgcagttgttttgaaactcgaaggattagttagatacaatgttgcctgagtcctctaacagctctaaaattcctggattatgtaaaatgtttagcaactttcctgtaataaagtaaaaagaaggttgaaacaagactatgagtcagtaggattatgaatgcaaaataaatcaatttttccaattgatcagttaattataattctaaaagctattccagaaatagctgattccactttggttcaaattttccttttttactagttaacatggagcatcttcataaatgcccccacatgtttctatatatttaggaaatagaatgatttcctaagattggatgctagggtcctattcaaactcaacatccaatttgaggagtaactcatttgcagtcaaaaccgtgtacaaaggacattcagggctggggaccttttctttaaagaaaaaaaagttttatgaaactttatgatgtgccaggaacatctatgtaatcacagaggccctggttactaagaacatgttgttcagtgactgtaatgggttggattgtgggttaacagccacgtacttaaaagctaacaggaataaaagaatatgtaaaggagttacatgggaataaaaggctattccacaatacagttctctgaatcacaatattgcctgctactgtgagttctgcagagctccgaattaaatgggcttgtaatgtatctccctggttttgaacactcagtggtttaggtttcccctaaactgataagcctccaaaaggccacagtctcagtcttggattgtaaagcacaaggacaaaaacaatcccactcccctacttcctagctgtgtggccttgggaaagttacttggtttctctaagccttcatttcctaatttttaaaatggggttgctgtgagaattaaatgagatgatacatgtaacatgcgcagcgcccagcacatctaaagctctcaaaaccggttggctatcgttaccattaaagcagcaagtatcagttgcctaactccatttcagtacttcagcaagtactgccattattacaatattttaacagcagggcatggttagcacaatgcagtcccataaagcagcccagcctccgaggtttgtattcagaggttactgtgttcctttccaggaccaccccagggggagctcctggtgcacaaccaatgcttcctgcctcattacacttggctccatctcctcctgcaaaagcctggggcgaggaagagcccagtctcttagacccgcacttctgagcgttaaccatctgggactcggaaaggaaaagaaagctttcttctcaggacagttctgcgccggtggtagccaagggctggagcccctgatgcgaagaaaagggaaggagagaggcggggtgcgaaagaaacgccaccgctcggcgccctccctcggtgcccgcggcgcaggggccacccgccagcgtacgggggacgaagatgtggccgcgggcgcgggcgggaggggaggcgatccggggaaggaagcggcctgttcgccagccccggggcccggggagccctccagcagcgcttgcggccctgaggacaccgctttgggagaaatgacgactcccttgctcaccctactgcgacaccccgtccccctccgcactctagcagatgcgggccgggagtagctgagctggccaaccgcctgggaccaggatgcggcagcgcccacccgcgcggcgtggagggggccgggggcggcgctcggcgcagatggcgctcgctgcgagatggatgctccagggcgggtaatcactcctggctcaacacagcatcccgggcggagcggatgccagatcccaccgctaagagcctgggctgggaaagcaatctttccaggcagcccccagcccggtgcgccggccccgacaagtcccagccctcggaggcagggcggggcgcagggactcccgggacccgcacctgtaaggccgacaaagcccccgcaagcgccccacccctctgtcctccgtgtctctctcgttccgcctcgattccccgagccctctccaggcagcgactggagaagcgaagtcggcctcgcccccgaactccgtggtcagcacaggtgtacgcacttccgaacaaagcccacgcccagacgtgtccgcaggggcccgaacaggcacacgcccgtgcgctcccggcccggcccccgcgctcctcgccccgccggcactgtggcgtgacgccccgcgcctccgtgtccaagcccgggaagccgccgtgccgggcccgcaggctctccatgcccaactgcccacgagcaagagctctgggcagggcttcccggaaagcgtggggtgcgggcgcggagcagaagttggccacaggctggagggggtggtgggtgccggcgctgctggatttcagctgtgccttcacccaagcgcaggtccccctgctccctctcggcgcccgcgggagtgtcgggggcctgcaggggagaagggagttggagatctgctttgcccctcctgcagcgctgccagcccggtgagcgctcggctgaaccccgcggcggtgtccaagtgacaacgcagcagcctcgcgcgtcctcctccgctccagccgtcacccccgagcaggacccagtgtcaccgccagacgcgcaaggagctacttacgttctcgcgccgcgccctccgctcagctctggcgcgactgcccaggaccctggaccgccggtgtcctccgttctcgacgaagctatcccctctggctgctccagccaggcggcccctgcgccgtcccccgcgcccgcgcgtctgaggctcggactgcggcgcgcgtccgccagcgaccctggcgaagcgaggctggccccgcgccggcgcgcgcccccgccgctcccgccctctccgctccccctccccgcgccgtgcttttgcccctcccggctctccttagcgtcctcccgtccccctcccccgcactccctgcgggcgtcctccgcctcctcccctcctggccaaccccctcttgccctgctgctgcgacggcagcgaatgggctccagccgccggcgcctcgagggactgggtggcccctcacctgagcggccgccccaccgccaacctccgtcagcctgcgagcgcgtgtggcggcgggggtgggggtgcggggacggagggcgggagtgttccggggctaggatggctgggatttagctacaaaagatgttccagaaaatgggtagtttttgaatgccactctcatgggtttagctttctgtgggaggtctgtggtcttctagttttttcttttttaaaaagcactttcttcgaaattcatcagttggggtggttgagattgggtgagtggttttgggggttttgttttgtttttgcaaccgttctttccaaacactccccgccgccccccaccaccgcagaaaaaagagcttttagcataaggcggatgctatctatccgcggtagaaactgggtcttctggtcccaaggaatagggttagttcggatttgcttatttacaaatgggggagtattatggagattttttttttttttttttggcaatgtaaatcgagaattaagattttccaactgtatagtatttgagtaaacacactgcttgctgcatagttcaggctccgaagcgcacgtctccactctatcgtggatggtgttcaggatccttagcctgacccttgggtcctccgtaatctactccggtctgcacacaaattacttgtctgctgggtatcacccgacttgaccacttacagcaggctccagcgcttagtgagctcagcggagccttgattccttcagttctctaattcaggaaaacattttctgagctcctcaccaccccaccccacctcaccacctcctccacccccagcctccaaggtgctggggcaagattcaggaatgaaaaagaaacaggttcatccttcaaggtcttgactaccccagtggtctgttctaacttcaatttgaacttgccccgtcagctcacagcatctgcatgcaagtgagcagccttcttttccttctccttctactgccatcctctcctccttctccagccaaatgtgctctggcctcacagagcctccctcggttcctgaaccagcatgatatctggctgctgggtcattgcacaagttgtttccacagtcccatcagtggttcttctgactctagtccttacccaactgccattcaggtggtaccttgcacctctcaactaattgtccaaattttcctctaaaataccttcccccccgcaaaaaaaaagattccatgatccccctacttgaaagtctgggctggtgggctggttctctattgcctacaaagtaaattccacatctcctggtgtgcctctttacaatctgctcctaacttatctctccattttccataactctaagcctctgcatgtgaggttcctcctagctagaatattggtccatctctttttcatttggcaaactcttgttcatccttcagagccttacttggttgttacctcctctgtaaggactattataatagtgctggtcaccttttaatgatctgtttgcatgtctgactccataaaatttcacttctttgaggacaatttgtcttatttatttttgtgtaaccacatttctcatcaatacaaatgaagccacagataaccataatcaactctcactgccccatcattttgccctgtgtaaaggacttgaggcccctccgttccttccccactgcagtaattgctgagaatcctggggttgtcttgcctgtccttcccatgtccttctacttcgtactctggttttccaagattgcccctcaccccggccactgagaaacattgatttctggtccacattattttccagtgaatgccacagggcaaacctgtcaagtgggaaaatgacaccctactctcttcagttcttgccctggttctgtgtagtaatttatcccccgggcactgaagcaacattgcttgtgtcttcctgtgttacaatctcataaagaccctctttaaacagctccttgaacttctgcttagaattgttctttctcttcaggctccagtcctggtctatgaagccaggttgaggcagacgatatttggtcctggtgaagtccaggttagtcctgatgcctgggagactacttaggctattgggggttgctgaaagaataaggacatgaatagaatctctctcttttttttttatgtgagtgatgatttctcaggtatagtttcccttacctttacaggtagagtaacaatacttaatacataaggttattgtaagaaagcactggacagtatctaggacataataggtgctcagcaaattctagtttaagcagtaattatttgataagatgtctgtaatgtaaatacatgcttgaataaaaagtacaaagccagaagagaaaaagctctggagaagataggaaccacagtgatagtacaaaacaaaaactaaaattaagtaatttggggctgggtacggtggctcatgcctgtaatctcagcactttgggaggctgaggtgggtggatcacctgaggtcagagttcgagaccagcctggccaacatggtgaaaccctgtctctactaaaaatacaagagttagccacacgtggtggtgtgtgcctgtaatcccagctactggggaggctgaggcaggagaatcacttgaacccaggaggcagaggttgcagtgaaccgagatcacaccactacacttcagcctgggcggcagagtgagactccgtctcaaaaaacagaaagtaattttgatactacataataattgtaataatataaaattattatatagttctgatttccagcttattacttcaactgcactgcagctctacattgctggggattcatctcctgagggaatgagcaacaggaagaacaaactgaggcttcaagaggagctgaaatgaagggagtatgggaggtggggatagaaaaatgttctacaattagaaagatggcggtgtgggcaaatagactttctaatgcagtctgtttgatctgcttggtgatgcatgaggcagtctgatttggctgcactttgctggtgatacccacaacttgcctccttaccctaactgctgctatccctttcccatccctaagccttatcctctccctattaccaagcctcactccatcttcaaacccagctgaggactgggaataaggtctgtgtcctcatcatgtgataataatagaatcattattattattttcatttattaactcatttattctgacaaaaattccattcagtaggcactattatcattccccttttagaaaataaggcaaaaaaaagttaagtaacttgcagaggtcacacagtttatctgcagagatgggattcaagccccgcattataactccaaagttaagtcttaaccagtcattgtgccatgctgtctatcaatgacaacacaccaaaagtttcattgttttcatagacacatcagaatgtcactgtgttaaaacagctacatcagaaagtcatggagccccccagtggtacctgcagtgaatatgttttagcctttctcttttcctctacttctgcagtcctgtctctttttctcagagttctccctcccctcttttcctcttccactttttttttttttaacgccttgccttattttccatctcaattttcttaatccacatccatgctgcaggcctcccaggggaggcagtaccattggtcctgtcctcaaatctaatgttaaattcagcaaaacctaacatggacccagcaatgctagtaatgagcctgttgccttgctataaaatgaaagaattggactaagtgagcacagaaattctttttcagctgtgtcattttttttgattctggtggtaaccaagagcatttttttcggctcctctagtaaaacacagataaaacctggctgaattctggtaagaatgactgaagcactaaaaaaaaaaaaaaagaaagaaaagaaaaaaaaagttcctgtcataatataacaggttttttgctagaagaatggcttataccagtgtcatcattatcttaatataataggttaggctgggcaacgtgcattagatttctgacaggcatgtgagaaatgtaggtatttttgtttgtttgttttttgagacagcgtcccactctgtcccccaggcttaagtgcagtggcgtgatctcggctcactgcaacctccgccttctgggtttaagtgatcctcctgtctcagcttcccgagtagctgcaaatgtagtaatttttaaagcctttctgtttgaaagggtattataacccaatattgtccaaaagcatagttgttataatgggaggctttctaaactggttcccagtgacattctcctcctggtattcttccttatgtgaaatctcctccccttgagaccagacctactgactccattctaactatcagaatatggcaaatgtagtgggatgtcacttcttctattggattacaaatcactctggtttctgtcttgctgtcttgctcttttgcttgcttgcctgctgccctgttgtaagctgccatatggagaggagaggttctcatgacaaggaactgaggagatcctgtggccaacagcctgtgaggaactgaggttctcagtccatcagcccaaaagcatctgaatcttgccacagctatgtgaatgaactcgaaagcagatatggtgctggataaagtagcaactgtaggacagacgagacatcggtatgacttgaccaaagttaacctcagcagctcttagctccataccccagggtcacactgagctcctagagccaggcctgggttcacccttcactgtactctaccaagagctggtcctttttcctcttggaaaagttctcgctggcccatacctcttgcagactcacagtgggtgatttattactcactatggattaggatatgtgcctatgtatttgtaatatataaataataggatgtgcagtttcatatgtcacctgatcagtaagcaatggaaagtttccacagatgcaaaacaccaattgctctcccatgcttctcctcaccatctgccacaccgccacagaattctatttgccactctggtgccatttgggcacgtgtcagaacccagaaatttgaaacccattccttgcctgatgcttagcaacacagcatccctacacctattgaaaatatgtaatgctcaagcaattggaggaaaatgtgaccttagtggctgctatatgtggatttctcctccacttatgagtcactaagaccttctgcttggctcaacccacccccatgcttggggaaccaagttggaaagaggaggaacattttcagcgataataaccatgttcctgtagccaatttctccatctgttcctacagtttctgtctacaagaatgtacaaaggttctgctgcatagatttaagactagccaaggtcagtgtgcaatcagccattgcagatgaggtcatcaaggacagggaattgcagctctggaaaacagatgctgagaaacacgctgatatgtgcccttcatgtctggcttaagggggaaacagacaacaggtacaatgaagacgaattcactgtggagggaagaaaggaagcggcttcagaaataatactcgagtataaatgaatgatttactcaaaagctttcttatttggctgttttgttgcattttaaaacagaaaagcgatcttagattagtgcacactgacattctactgtttatgttttaagcatcaatttaaattttactttaagtttttcaatatatttttgaaattgtggtaaaatacacataacaaaaaatcttccatcttggccgggcctggtggctcacgcctgtaataccagcactttgggaggctgaggcgggtggatcacgaagtcaggtgtttgagaccagcctgaccaacatggtgaaaccccatctctactaaaaatacaaaaattagccaggtgtggtggtgtgtgcctgtaatcccagctactcaggaggctgaggcaggagaatcgcttgaacccaggaggcagaggttgcagtgagcccagctcgcgccactgcactccagcccgggcaatagactgagactctgtctcaaaaaaaaaaaaacaaaaaaaaaacttccatcttaaccatttgtaagtgtacagtttagtagtgttgagtatattcacattgttatgcaaccatcactaccttttatctctaggattctttttatcttgtgaaattgaaactctatacccactaaacaacaaactccacattccccttttccttcaggctctagtaactaccaatctactttctttctccatggatttgactactctaagtccctcatataagtggaatcatactgtatttgtctttttgtgactagtttatttcgcttagcatgatgtcctcaaggttcatccatgttgttgcatgtgtcagaatttcctttctatttaataatatactattgtacatatctatcacactttgtttatccattcatctgttgatggacacttaattgctttcaccttttggctctcatgaataatgctgctatgaacatggggttatgaatatctttctgagatcctgctttcaatttttggggatatatattcaaggtgagattgctagatcatatggttattctcatttttttaagaaaactattgttttccatagtggctgcaccattttacattgcacaccaactctgcacaagggttccaaattctccacatccttgccaacacttaatattttgttttgtttttggagagtagccatcctaatagatgcaaggtattaaaatatttttaaatgtcaaaaattcacaagatacaagcaaattcagtattttagaaagtcctgctctaccctggaccctgtgctttaagaaagccctgttctgactctcctagaggttatgctaccatctcctccttctagaacatatctgggtacctaggatccaagaattctgttgggacttgcaaaagccccttccccacataacagacagtgggctgctctgctggtatacacaacagaaagcctcagagacagctgatgcaaaggtgtgggggtggtttgcaggatgttgatataacttgcttgtgggttggaaagttcacccaaggttacttgaagcctttgaaggctcaggactaagtcgggtgggccacgggctgggtgtttccatgtcaccacattctaccacagaattctaaagagtctaagaattctaaattcaaacctggacttccaggtctttaagattatatgtttgtcaaggtaagacagaaaatataccttttaaatatttaactcaaaacttgttacctcccatgggctctgatgagggactttagagaaactaaatgcaaaactggacaacaataaaacccattttgttccatttgtgtcatggtttgaatggtcccccaaacttcacgtattagaaataattcccaatgcaatgggagaggggtgctaataaggggtatctaggtcatgagggctctgccctcataagtgaatgtagttatggtgagagtaagtttgttatagcccaatgaaaagattccatctgacaaaatgaagattccagattagaaggaatcctatgcagccataaaaaagaatgagatcatgtcttttgcgggaacgtggatggagctggaggctattatccttagcaaactaatgcaggaacagaaaaccaaataccacatgttatcacgtataagtgggagctaaatgatgagaacttatgaacacaaagacagaaacaacagacactggggtctacttgatgggggagggtgggaggagggagaggagcagaaaagatagttactgggtactgggcttaatacctgggtgatgaaataatctgtacaacaaacccatctgctatagaattagcagatattggtcaaaaagatttctcaaagctcactttcggacaaaagaatccttttattctgtgcctggaaggcccatactgagtccctgtcaagatacaagacatgcaaacggtatgaacgaagtttaccttagcattaggtgaaaggaaatgtgcaatttctattgtttagaaagtctcccaactcacactgaggagaatggtcccagttgtgattctacttaccagcacaagggagaagccccatttgatatcttaaaaagaaattctttcaaaaagtacattttaaagcattttcatttctcccatctccctataattgcgtaaggcagatgactcagttaagcctaacttaagaaaaatattaaggacttataatgtatctataatagcagcacgctacaagctgtgaggtatttctaagcagcatatggcaagttgagttgggaatgcataatataattagataaaaacaaagaaaactatgcaatttcaattatttactgcccaatgaggacttttcctccttttgctctcaaacttcagaaaaaagcaaatacaatagtttcaggtacatgttttaatattgaaattgtgacttttgcaggtgttttcaaatgattgcaaggcttaacattctggtgcatacaagatacttttttttttttaagtaactctttggttgtgaaaattactcaaaagagggttggagttgagctcttattctcacttgagcttgattatgcttgtgatgaaccaaccagatgtagcagttcttcctggacactattgcagacacataccagattaggacacagctactttcccatgctcaaaaaattagaatggtaaaaacctatattacaaaattctatactatctaaacttcatcaaaacctttgaagtatgtatattcttgtaatactccatatgcatatgaaaatcagatatttgcattatatactaacatagtctaaagtttcaccacttctaccatttttcagtgtcagctttgggcatttttttttcacataattcaacacaggaaatggaagtataagggcatgtttagatgtgtatggattaattgcctcctgataccaaacatgttcattcaaaactagcaaaataacagcacctgtgatttataaaactgtggtttcaatgattaaaaaatagaaaaaaaattgtagttttaaataactcttaattctactggcattattttcaaaaatctgtgttcttaagaccaaatctgaaagacagagtgcggtagaaattacactggctttgtttacctttttcaatttgaaaaattttgattaagaattccctagagtgttcatatgttaccgtaaatacaaaagcacaatgactgttctcctagtacactttcaaaaatgtggtccaaatgtacaaaacagaatgaaagacacttgctttttcaagattactacaggtgaatgtgtattcatatagatgacacatatcttgccacaaaacgtttagtggcttctttttttcctttttagcattttgtcgcttggccaaggtatgggctatttttaattgcattcacgttctttttaaaattactttgatagccaatttaattaaaatactacattaaatacttttctagaccaaggtatgttgggcatactatgcactataagatgatataaccttcttttcttctcagataattggacagaattttggattgctgttaaccactttatcttttacaaacatagtcagtggtagtgtatgccataagaaagagtgctaccctattcacagtagcaaagacacggaatcaacttaaatgcctaccaatgacagattggataaagaaaaatgtggtacatatacactatggaatactatgcagcctaaaaaagaacgagatcatgtcttttgagggaacatggatggagctggaggctattatccttaccaaactaatgcaggaacagaaaaccaaataccatgctatcacttataagtgggagctaaatgatgagaacttatgaacacaaagaaggaaacaacagacacttagagtctacctgatggggaagggtgggaggagggagaggaagagaaaagataaattattgggtactggccttaatacctgggtgatgaaataatctgtacaagaaaaccatgtgacatgagttagctatgtaacaaagccttcaaatgcacccccacacctaaaagttacaaaaaaagagcactaccaagtagcacttgttaactattttatattctattagatgggtacatttatcttggtttgatctttgaaaattgcctaagtagtacacatcaattatttaaatgtgatgtagattagatgacaatatctgaaaggatattaaagtgtttgtaattctagataattttgtaaagattgctatatagacatgttaatgatgtggtttataatttcccattgatattgagaaagcagtcaagaaatatgacttttctcgctatcatctcagtgttactatataaaataggaataatgatgatacctgccttgtaaggttgttgtgaagattaaatggcaataaatgttagctacagctattactggaacattcaaccattttggaccatataacctgttcctattcaatcagactgaagtccttaaaataccatctcaaaatttatattgttcaggggcaaggaatgaatctataagaatgttaaagatttttatcacgaagataagtcaacgttacagtcaatactttatttttatcaaaataattaattatccaagctaataatgcatatctgtgaagtgtaatgaatttcaatccactcgcatcaagctgaataaaggttacaataaacaaagcaatcagtgtgacttctgagagagacatttatcaaaccttggaccaacacagccaacggtttagcctagggacatctgtactctatgaatcttttttggatggtacatagctcctgccaggaacagaacaaactgtttttttaatgtgatcccctccttcctatttcctagtcatggaagagtaattgccatagatttgctccaaaaaagtgagattaagtgaacagtttgattgtatttaaacttggcaaaaaaaaaaaaaaaaggaggaggaccaatgaatgcaaaaataattccagttgggattgaactggaatggaattttacaaatggtttatgcaccctgactgggcaaagtatacctttaatttgttgtggaagaaattcattacttgcattttgtggatgagtagctcagagtttctaaaagggagaaatgttggtattttgggtggaagaattattcatgaggggctgtccaatgcccattgcatcccgtaacatttattatctgtctcctggagtacttaatgctggcgattcccccagacaatctcgcttctccccactcccagatttgcaaaccttccaagaccactgtgttaataaatgaagagataaagagaagtattcacataatttgatgttgtaataattgtttttccaaaaaaaaaaaaaaaaaccctctgaagttatgaagactgagaggacatttactgagacaagtacatttctccactgattaaaccccagatttcacagattcagtttagtaaactagatttgaagtcacttcacaacattccaggaaagacattccgggaaagagagacaggaagagttgtggctaagacaatggactggtcctagctctatcgctctctagctgtaattatcttgggccactttttctaacaaagggataatactgctattcaccttgtaggcttattgtgacaatttaacgtaacctgctgagctcagttcctggtactcagcaagcactcaagtgttagctatgttctagtcacaatactggcacagacacttgtgaaatattcaaaagtgtgactaggaccatttctagggcatagcgggttaggtacaattctgagcttcaaacttcagaggtcctagctaccccactaatcagcagctcagctgttactagttgctggggggaaaaagctcagagggagcccctccctcctaccaccaaaacaaagttgtgagattcccctttatgccctcagactgcatacttttgtgactccctttcccctcaaaagattcctttcaggccgggcgcagtggctcacgcctgtaatcccagcactttgggaggctgaggcaggcggatcacctgaggtcgggagttcgagaccagcctgaccaacatggagaaaccccgtttctattaaaaatacaaaaaaattagccgggcatagtggtgcaaagtactcggaatcctagctacttggaaggctgaggcaggagtatcgcttgaattcgggaggtggaggtttcagtgagccgagatcgtgccattgcactccagcctgggcgagaagagcaaaactccttctcaagaaaaaaaaaaatgtggtttaggaagaagtagtgcacagtgtagttataacccaggctgggctctctctaccctctaggggaaatcccatctagctcaaatgcctctagggacaactctatctgaagtacttttttttttttttttttttttgagactatgtcccactctgtcgcccaggctggagtgcagtggtgcgtggtgctattttggatcactgcaacctccgcctctccggttcaagcaattctcctgcctcagcttcccgagtagctgggattacaggagcgtgcccaactaattttttttttttttttttttgagacggagttttgctctttttgcccaggctgcagtgcaatagcatgatctcagctcactgcagtctctgcctcccaggttccaagcgattctcctgcatcagcatcctgagtagctgggattataggcacccaccaccacacctagctaattttttttgtatttttagtagagatggagtttcaccatgttggtcaggctggtctcaaactcctgatctcaggtgatccacccgcctcggtctcccaagatgctgggattacaggcgtgagccaccgtgcccggcctaatttttgtatttttagtagagatgaggtttcaccatgttggtcaggctggtcttgaactcctgacctcaagtgatccacctgcctgggcctccaaaagtgctgggattacaggtgtgagccactgtccctggccatgaagtactattttaataaagaatagtatctgcaacaagaatggaactgaaatattaccagtacaccatttactattgaaataagacttctgagacactcaggaaaacctgagcattaaaacaatttttattctatatttaaaaaataagagttgaggaatttattacatttataaaatagaccattcctcctctttgcctttttgaaaagggcaaatattttacctgtataagactgaaaattcattttcacatctgtttctattgccatcttgtattatttgcagaatttactttttgggttcctttggataaagcaagcactggccttgttataaaatgagggttatctcaggtgaattacagttcttcagataaccagtttcaagtacaaatgaggacaagaatggctgaaaactggtgcaccacacaactgggtttgccttttgtttgagagtgaaaagagctaaagaaatagggatggtaggtgccatgctacgtggtttatattaggtgtcagtaaaaaaagaactgagttgtatatatgggaaacttcaaaaaaaaaaaaaaaaaaaaaagaaagaaagaaagaagccatggccagagttcacttgtgtaatgtattatttaagaaagaaataagccaagcacaaataagggacatacttaacttcagctgtaaaacagatgaactacatcagtttaggactagagtgaccttatgatgaggtgcaaatatgtaaatatgcataaatattactttattgtgcttgaaatttgctttattacgaagaattcccagaaatattctgatttccaattatttgtttttttcttgcatttacaagttgttcttagttgcatgttattatgtattatttgtggtctgaaagaactatattatctttagaaatcattggtagtttcctattttatactatgtctaaagtttatataattcggatgttagaaaattttacagctacctttcctcattttacaaatgagatatgcaaagcctacagacatttgccttcctcaaggtaacaaacagaagggttcttgcagcaaaggcaggattagcatccagactctcgactccactctttgaaccacatctcacagcctctgtgaattgatattgcaaagaagcaatatgactatctgggcaacagggtctagctttagtttgtatgtctaaaacaaggggcgctaacctttgtttcatttttcttaagaaatcaaaacattccatgtaaggatttatgtgacaaatagatacaataaagatgagtttgtttggcatgaacaatgttccatgtaagtgcatcttaccaacttccatgaaatccagacagttcaaaggagttaataaggtaaaacaagcctaacttcttcttttttttttttttttttttgagatggagtctcgctgtgtcgcctaggctggagtgcactggcgctatttggctcactgcaacctccgtctctcaggttcaagccattctcctgccttagcctcccgagtagctgggactataggtgtgcaccaccatgccgggctaatgtttgtatttttattagagacgaggtttcaccgtgttggccaggctggtcttggactcctgacgtcaggtgatctgcctgcctcggcctcccaaagtgctgggattacaggtgtgagctactgcgccaggcaactaacttcttatttttaagcatactgctgccaggtgtattcaaaggctaaaggggagctacattatgaacaaaaattaattttaaaatgacattagccttttaacaacagattatttaaatagtttatttttgttaatgataggaatatctcctcagtaagttcaaaccattttataacagggaagaataagctagtgttagatctggaaaagttaatatagcattatcttgaaatttcaggggtaaaaagtggttgactggaacttcaccttttttaaccaaacaatgttaaaataaacatatctgaatagaaaactgtatctggttcttttttatgtcaaatgtaaaatactttaatagagaaaattccatttttctgcatctatttagatgatattacaataaaaggcagtgtggattggagaacatagctagtgagaatattaggtaatgtaaatttaagaagaaattagcttttccatatgaaataaaatcaatgatcacataaattcaacatgattatgaggactaaagtaaaaatacacagtacaatatagctttcggtttcttgttcggcacatatattaatatattttcaaacatcaaacaatataacaccaatatctactaaaatctactagcacagtaagggttactaaagcttagctaattattaacatcttaaaagcctagttcccatatgaattctgtaaccaagaatattctctgtgctatgcaagctggttgaagcaccgtctttttcaggattctccagaattcatacgtatttcaaagttaactcatgtcgaaccccacaattccttattgaatgtggttgatcttctaaacagaccttcatttatgagaacataagcatatactcatcacaattttgaaaagaatggaagtccttcatacatatcagtttttaattttatccaatcattaattttctgcagagttgttttttcttgacttaatatttttgcaacttttttcattttttgttcatttctttctatgtatttcaacccttccaactgcagctgatccagcttttcatttcgactttcatctagaggtatgttttcacacattacaggattgaatctaaaataggtgtcaggaggtaacaggccatcaagcattatatggacttctgttaaagcaaaaaagaaaaggataaggggataagaaaagaggggataaagtgagcaatgaactgttaatttgtctttatttaaaattaacttctttttaggcacattacaaagattcactaatttcattattcaaactgacagtagaagtaatccataataatgggtaaaactataagataaaattcatcttccaaaatacattattctgtgaaattagtatacttcttctattctctctgtgcttttggtcatactgttcaccactgctgaaatgccctttccaactttccttttttttgggatcaacttcattgacatatcatttacatccagtgcaactcaccaattttaactgtatagtttgacaagttttgacaaatgtatacacttgtgtaagcacaacaataatcatgacatagccatttccatcactgtaaaaagttcctttaagcctctttatagttggtgcccactttccctttcctagaatttcatacaaacagaatcaaaagtatctaccttcttttatggacaaaatacttttgagattcatccatgttgtagcatatatcaatagttcctttcttttcattgctaaatggtgttccattgtatagatacaacacaatttgttctctgcagttctggtctggctctcttcagtttttagctactagaaataacccgattataaacatttacacataagtcttcatgtgcatatgattgcatttcccttgggcaaaaacctaggaataaaattgctggttcatatggtaaagggtatgcttattttaaaaaaaacctgccacactgtcttccatttttgtattccaaccactaatatattagagttctcactgctctacatctttgcccaaagttagtatgtcaagtcttaagttttgcattatagaggtagtggtatcttgtggtttaatttttatttccctaatgactaattatgttgagaaggttttcatgtacttattagtcatttgtatatcttctttaatgaagtgtctgtttaaatcttttgcccagttttttcactgaattgctgtgtcctatatatatgacagtggtgcaatcatggctcaccgcaacctcgaactcctgggctcaagtgatcctcctgcctcagcctcccaagtagctgggactacaggtgtgtgccaccatgcccagatagttttttatttttctgtagagatgggatctcactatattgaccaggctggtctcaaacttctgggctcaaccgatccacccaaagtgctgggattacaggtgtgaaccaccatacccagcctattattttatatatatatacatacatatgttatatgagaattctctatatattttgaacttgattatatattatacctcatgatgggtcagatgcatgttttatcaatattttagtgtatgacttgccttttcattttataaaaagtaccttttaaagagcagaatttgtaatttgaagtctaatttatctctttctttcctttctgattcatattttctatgtcctatctaaaaaaatctttacccaaggtcattaagattttctccagcatattcttctatatgttttatagtttcagctcttagattcaggtttccatctaagatcaggaacagggtaagatgtctagtctcacaccttccagtaagcattgtactggagggtccttttcagtgccgtaaagcattaaaaggaaatgaagggcatgtagattaaaaaggaagtaaaactctatagacaacctggttgcctatgttgacaattttgagaaagctatagaaagctactagaataagtgagtttagcaagtttgaagttatataaggtcaataagaaaaatcagttgtatttctgcatattagccatgaacgactgtgatgcattccaagttacttttgtgtatggtgcaaagggtcaaggtcaacgctgtggatacaggtatctaatagtcccggaccatttgttgaaaagactgtcctttcccactgagttaccttagcatctttgtaaaaagtcttttgagtttacatgtataaatcaatttctggactctctattacataccattgatttatatgtctatctttattcaaacaccacagttccttgcttaatgtagttttatagtctttaaatcagcagatgtaagtcctccaacttttttttctttttcaaaattgtgtcagatattctaggtcaggggtccccaacccatgggctgcacagcagggggtgagtggcagggccagtaagcaaagcttcatctgtatatacagccactctccatcgcttgcattactgcctcagctccacctcctgtcagatcagtggtggcatgagattctcataagactgcaaaccctattgtgaactgagcatgcaagggatctaggttgcgtgctccttaggtgaatctaatgcctgatgatctgtcactgtctcccatcatccctagataagaccatctagttggaggaaaacaagctcagggctcccaattctacattatggtgagctgtatacttattatatattacaatgtaataatactagaaataaagtacacaataaatgtaatgtgcttgaattatcccaaaaccatccctcccctccccgcccccatgtgcggaaaaactatcttccacgaaaccagtccttgggaccaaagaggttggagaccactattctgggtcctttgcatatccatatacattttacagtcagcttgttaatctctatccctcaaaagcctgcttggattttgacaggaattgtattgaatctacatatcaatttgtgatgtgataccttaacaatattgagatttccaattcatgaacacagtacatgtattgatttatttaggtctttaatttctctcagtaatgttttatagttttcactgttcagatcttgcatgtagcccacaaattttagtttccttggcctccttgaactgcaaattttgtttccacaactcccactgagactaccccacttttctggtgctatagaatagaaactatgctatagtgtagaaactcttttcaggcagcaagctggacaataatagtgatgacctcattcattctcctttcagagatcgctgtcctatgttacctgttttctcatgtctgaaaatcattgttttgtctacttttctagttgtttaaggtaagaggaaatatctggtccctaatagtttatgatgtccagaagaggaagtcttaactctcttttaaaatgtccaaatcctatacatcctttaagacccatatcaagtctactttatgtcttataagctgtctacaccaatcaagttttctcattccttttcttaattcatagtcttaatcacttacaatcatttaccatttatttagcaattcaccacagattaaaccctataaaattgttgtttttgtgggccaacagcaatgttgttgttatatcttataacagcaattcttgttatatctttttcaaagttaactaagtttattaaatttttactcatttgtcttattaactggagtgcaggtacactgaggcaacatttcatgtttcttgaaaattccaaataagcccattacatggtttgcacaaagtacagacttaactcttatgcgactgcccgactaaagccacttgtctcagcaaatggcttatggtaaggatattttattgagccatcacggaaatgtgaatcaaaaccacaatgagatcccaccttacacctgttaggatggctgttataaaaaagacaagagataataggtgttggcaaggaactggggaaaaggaacccttgtaaactgtttataggaatgtaaattggtacagctagtacagaaaacagtatggaggttcctcaaaaaattaaaaagagaactaccatatgatccagcaatcccactccgggtatatgtccgaaggaaatgaaattgttattttgaagggattgctgctcacccatgttcactgcagcattattcacaatagccaagatatgaaaacaacctgtgtccatggatgaatgaatggataaaggaattacagtatatacacacacacaagaatcctattctgccttaaaaaagaaggaaatcctgccacttgcgacaacgtggatgaacttggaagatattctgctaagggaactaagccagacacaggaaaatgagtagtgcacagtaacatttacatgtggaatctaaaatagttgaactaaaaaaaacagaggagaatggtggttgccagacactggggagtaggggaaatggagagatgttggtcaaagggtacaaattttcagttatgactacctactagagatctgacgtacagcatggtaactatagttaataacaatgtattaagttttgtttactttaaatttgctacgggagtaaatcttaagtgttcttaccaggcacacacaaaatagtaactacgtcaggtgacagatatgcttattagctggattgtgggaatcattacacaaggtatacttacaataaaacaacatgttgtacaacttaaatatatacaatttttatgtcagtctgacctcaataaagctgggagaaaaagagtattttactgatctggcaacaaaatttcagatagtgaaaaatctagcacatgagcttttttttggttttcattcaatgaataaaagtcctcagtggggagtttaagattctcacttatgttaatgacttggccaataatatgctgatatgaaaagaatgagattcaaatacaagcagctgttaagtggtaataattttttttaatttagtaaaacgtttcacccaataattaaaaacaaaatagtaaaatgaggaaatctaaacctcaaggcaaggcccagtggcccatgctagtaatcctagcacttcaggaggccaaggcaggaggatcacttaaagtcagtagttcaagaccagcctgggcaacacagggagaccccatctctacaaaaaaaggtctgaaaaattagctgggtgcaatggtatgcacctgtagtcccagctactcaggagactaaggtgggaggactggttgagcccaggagtttgaggctgcagtgagctatcattgtcactgcgttccagcctgggcaacaaagtgagatcctgtttctaagaaacacacacacacacaaacacctcaaggccaaaacctgaaattcaacatacactcactgaatgcctactatatgccaggcactggagtcaacagcaaactgggtaagtcaaagtaaactggataaattcttgccttgcattcttgttggacagaaggataataagtaaacaatcaaatatgtaatatataattacaatgagataaatgctgtaagagaaaaagagaaaaagaagcagactgagaaattaagagtgagatgataaggaaaatggaaaagcagtcaggaaaggtttctctgaggtccctctgacatttcaacagagacctgaatgaaataagggtcaagtgcctatctggggaaatagccttatagagagagagtacagcaactgcagaggccctgaggcaggagagttcttagcaagtttggtgaccaccaagaattatccggtggttggacacactgtagagaaggtacacacttgaaagagggttttgagaagcagacagacattatttaatttgtttttggtttttttttgagatggagtcttgctctgtagcccaggctagagtatagtggcacaatcttggctcactgcaacctctgcccccaaggctcaagtgattctcctgcctcagccttccaaggagctggaattacaggtgcacactaccatgcctggctaattttttgtattttcagtagagatggtgttttaccacactgatcaggctggtctcaaactcctgacctcaagtgatccaaccgcctcggcctcccaaagtgctgggattactggtatgagccatcgtgcccaacctaatttgcattttaaaaggatgactttggtctctgtatgaagattaaactataggggcagcaagagtaaaagcaagaacacattctcattccagtttgccttgacagtattaaataattgaatgtcctttactctaaatctttgctatcatgtatatgtttgaacaaatctgactccttttgttgcttttccctttcttaactggcttcagagtctccaacaaaatgttgtgctatccagctttaggtacttctccaacagtaagtgggcaaaggtagcactatctctcaaatggaaaacagtctctgttctagagtcacctaacaagaaacaagtgagaaaggaaaacaacaaaatgtttcctcccatgtacttcctaaatccacaatacagacatatcatatgcctttgcagttaggaccaacaaatgccaccaaaaaactgctagaatgctagaagttgaagtattttaaagcagcaaacaagactaaccttctgtatctgtagcactgttgataacattagaaagtttagttttcaagcttgtgtatgttaccgtgtttctcacatcactctcataacgtccagtgcccagggatactatgcactctaacggcacatctggccaaagacatttacactcatgcatagctaatgccgaagggttattcagaagcaaacctccatcctgcaaaatacaagttaaaaaaagaaacttttaaaactgactcacggggaaagctgaactatgtaataagctaaataaattatttaaaaccaagaggttccttaaaagtgcatttcttttatagactacagctgcaaaaaaatccatgcgaagactcattggtctcataaagaaactttttattaagttttcctttcctattatgaaagttctttgaacttcttaaattgctttgcatattttgctaaaaaatattgaaatgaacgaaattacttttcaagacacattatcttatttagtggttaatacaggttctacttaaagcctaacagaaaagaactgtggttctaccaaacaattaaaattagttcttctctcacaagtcaaataaaaccaaataattctaagttagttcaaattctatcaacaatacaatttcaatggatcacattcattataatgcagatataacgtaaataacagaataaaccttatatttctaagtatgtatcaatatcaatattattttgaagacttcaaaaggaaacaaaggtattaataaaatatgctgatagagcactataaaaatgtagtagagtaaaagtagataaaattatggtcaaactataataaaatgtattgtagaaccatattaaaatatattacatcataaacattatattgtatttaaaatctagaaaaatacactgagcatggtggctcatgcctgtaatctcagcactttgggaggccaaggcaggagaatcgcttgagtccgagagttcaagaccagcctgagcaacatagggacacctggtctctacaaaaaaataaacaaaattagccaggcatggtgtacatgcctgtagtcccagctattcaggaggctgaggtgggagaattgcttgagcccgggaggtcaaggctgcagtgagctgagatcacaccactgcactctagcctgggcgacagagcaagaccttgtctcaaaaccaaaccaaaataaaccaaataaaatctagaaaaacatatctgatttaagatgttttaagtgactgctcagcctccttctcctgttcagctcccatccatgccagttaaccgtccgctgagtacacggaaaggcatttcttcagtggtaaaccacctgaataaactcgaatgatttttgatgtcactggtgcttggcatctccctggaatcagcactatcactgctgagaattgtaacagaccttggaattaccctagttcagtctcccacatatagccttaaacagtttttgacagaatacttaaacattttcagtaatatggtgcatacaaccttgtaaagcagctcatttcattgtaaaatattttaatttttcagattatacagtaaaattaacttttttggtatgcagctctatgaactttaatgcatatagatttgtgtaaatattaccacaatcaagatacagaatagttccatcacccccaaaaactctctcatgctatgtctttgtaggcacccctcctcccacccataacccttgacaaccactgatctgttttctgccactactaaggaggtcatagaaatggaataatacagtatgggacttctttaaactgccttctctttctgagcatgtcatcgagactaatccaagtagttgcatgtatcaatagtttactcctttttactgctgattgtatggatgtaccacacagttcatgcattcatccactgtaggacctctgggttgtttccagcatttgactgtcacgaataaaaaagttgctatacacatgtgagtacaggattctgcatggacataaattttcatttctctggagtaaatacgagtgcgatcgttggagcatatggtaagtatacgtttaactttataagaaactgccaaaacattttcaaagtggttgtccattttgcgttcccaccatcactgtctaaaagttccagttgctctgcatcttattacagtaatacttggtactgtccgtattattttaaccactttaacagatatgtggtggcatttcatcattgttttaatttgtgattctccaatgcctaatgatgctggatgtcttttcacaccctcatttgccatccctttatcctctgctgaagtgtctgttcaagtctttggctcacattgttaaattctgagagtttcttatatattctagatataactcctttgttggacatgtgaatttgcaagtattttcttcctgtatgtcgcttgtctcctcatcttcttggcagtatatctgcagagctaaatttttaattttgatgaagtccagtttatcaatttttaaatttcatgtatgatgatttcagtataattgtaagaagtcttcccccaacccaggtcaccaagtttttcttctaaaagtttcatagttttgttttacatttagaactacgatccattataaattatctttgtataatgtgtgaggcttaggtcacaatttctggggtgtgtttgtgtgtgtggtgggggtctaggagaaaagacagggagagagaaagatgaccaattgtttcaacacaatttttgctgaaaagactatcctttctccactgaattgcttttgtatctttgtcaaagatcaaatggccatatatgtgggagtctatttctgaactctctatttaattctatttatctacatatctatctttatgcaaataccactctggtacagtagccatgactactgtacctttagagtaagtttttaaattgactagtgtgattccttgaaactttttattcttttaaaattgtttaggccaggtgcagtggctcatgcctgtaatcccagtactttggggagctgaggcaggtggattgcctgagcccaggagttcaagaccagcctggacaacacagtgaaacctcatctctactaaaaataagaaacattagctgggggtggtggcgcacacctgtagtcccagctactcaggaggctgaggcaagagaatcacctgaaccagggaggcagaggttgcagtgagctgagattgtgccactgcactccggcctgggcaccagagtgagactctgtctctaaataaataaataataaaatagtttaaactattctcattcctctgcccttccatataaattttagaatctgactataatttttgaaaagtcctactagagttttgattggcattgcattatatttatggatcacttcaggaataactcacatctttaccatgtagcatctttcaataatggtatgcctttccatttctttaggtcttcttttatttctttcatcttctgttttcaacatacagattccctatgttttgtcagatttatatctaagtgtttaattttttggatctactgtaaactgtactgcttttgttacaattttggtttccaattattctttgcttgtatataggaatataattgattctcccaagtagttttctttgtggaaaatcaactacccccaccattggtgctctggcttaaaggtcccattaagaacatcatgtaggattttgccctactaatgaagcatactactgttactaaaatttctcatgaaatgtgaagaacactcttcatcttttcacaaatttatgctcagttattttagagggagtggtagtattttgcaaaccacagattatgataactcttcatttctggcattataaaataactttctcaaaaacttgtatcccaaataatactctggttggatcaataagatcacattaggaggcaactattaatatatagaaatgttcctaaatactaacaacacttcccagagaaagttaattggctctttagttatagaatagccagtctgaggctaacagacctttattatggcaaatgtcatttatcaccaatgtgtagctttgtgatacccttgagataactgggatatacagggctgtgttgacgttcagaaaagcagtttgccacgtctttctattgcttgctctattctccattttagcatgggtggtttgttgccacatttacttcaaaaacctattcatccaactactcttcaaagtcacgcattgaacttcgttatcaaaataaatggaatcatatagtgtaagtttttttgggtctggtttcttttacttagaagaatgcttgtgagattcatctatgtctctgtgaatgtcagtaattcattcctttttattgctgagtaatatttcattgtttgaatataccatagtttatccattcaccagttgaaaagaactatttttaaatttagctatctttatacatttgttgaaagtcataaattggataggtatttatatttgtattgctgagctttgtaaaaatctacttagattccttcaatgcaggtggtaataattaagctatttcctaaaggccttctcaagtacaaattttaacttaatcctttcaactttttcctttgttttcaattaacagatcattagaatgatacttatcccacaacagaggtaacatttaatttctaatttggcagaaaagttatttttttactaaaccatttaaaccttaaattttatatttgttatactctgtgtaacttctaatcaagtaggtattttagatgaaacacattttcattatataaaagcctatataaggatgatcagaaaagacaaaaaagggaaaagatgaagaggcaaacaaattttagcaagaaacgataactgcaaaatcaatcccaaatcaaaaaactggcaggtttcctgtagttgtgctaaccatttttcaaagcaaatttctgttccttcaactttactcactttttatcaaaaaagtacagcagttaaggtttctgggctcactctaatctagtggtgaagcatactatcttttaagctctgcttatagttagcctactcttgtcagatggctattctatcagtaggtcattgggctaatattaggtccatggtagttcctgtagaccacatcctgttaatattttttctttttttggtagagacagggtctcactttgttgcagcaggctggtcttgaactcctgagctcaagcgatcctccagcctcaacctcccaaagtgctgggattacaggtgtaagccactgtatctcagcactacaatctatttccaaacatttttatcacccacactctgtaaccattaaggaatcactccccatttttccttcctcatcccattttctatccctaatcaatgacccattttttatacatcaagtcagatgacaacttctttgttaagctgaccctgacagaataaatcacctctatagtacttcttaatcctgtacatatattgatgattaaatttttacctcattctataactgggtttacattctttttgtctgaactatttgagggcaggatccaggaagcacaaacaatatgccaactatggttaaaaatctttatatccttcccagctagcacagtgcctaacactgagtaagcactcactacatttctgtccagttataatgaaaattattaattgtggtttggtataggcataatttggcaggtgttggggaggctctttctgctaaaaacactctttacctggaatgtttaaataaaaatttcataatttatttatgtttatgtatcctaagctctgaacaaaaacttttgtgatgtaaataaagcctggtaggaataatatgtatatcagaattggtcatcaaaacctctagtgtaaactaatttatcagattctttctccaaagacaggaatgaacaatttaattttgaaggtggagatggaaagagagaaggaataattttgtttaaaaagtagtacttccatgtacatattatgctactacttgggcagatagggagagattgggagctactcacaaagaattcttctcactttataattttctaggacttgtaatgaaccttataaatgttgtaataatcttcttcttatagtcaaaggcaaatgaatctccccattcacctacacataactcttaattatatcactactttcaataattgctcaaatagaatattaattaacctctactacaatggataccaagtaactacattaaaacatatgtcagatgtgacagctaaaagggattttcaaaatgagactggtaataattgaatataattattaaaagaatttaggatgagaaggttgtagtactatactttaaacttggcaaaacttctgagtggttagaaagaattaggactttacttgaacgttttctttgtttaagcaaccaagatcattcacaccttaaaatattcccatcaatcttctgagttgtcatttgaagtgaaaaatatcccatttcttcttcaagtcttggaagagaatacagagtaagaaaaatatttccttaagtaggtttcttaggctctagattccattttaatatttttattaattaaatgtgccaaagtttctgaagcttattgatttatatgaaagtacattttttgcccatgtggcaatatgctttacataaaaatttatgtaaattataaataacatttatttattcaaataaccttaagaagttattttaatctgtggctcaaaataagttaaaggattacggtcatcaatataaaaatgtctaagcgtgaacagaaatatcactaatctatctgaaatggaaaaggaaccactgaattactttggtaatatatattcaacagtactgaattaaactttagaactactttcttttggataaagaataaagagcaaatgaaataacttcttttgaagtgtggaaaacacaagatccccaaatgtaattatttagtatttgagactttcactaattggcataactgcaagtttgtagcactattaaggttataacttaaaaattctattatattttacatacactgtctaaattatttctcaatttatgacatggtacataagaataggggaaatcgttgttaaaaatagtaagccacatattaaaataaaaattttattttgaccaataagtcctgaaatcagtatcagaaactcagcagccagtactttctgcccagagtgggtggaagaaagagaagaaaggcaagaaggggaagtgccttaaataattcaacaatgactgattctgcaaagtaagaaatggtttgaactgactccaaagacaaaggaatcctattttaatctcttaactacaaatattatattacttaaagattaaaaagaaaataggaatagctggccataacattttaaaatatatataagctattgtatcaaaatgagataaaattgataaaaatgttttagtttaaatgatccattagaaagttttgaagtttatattgctgacatgttgtttatatagatctatgtatgagtttttgaatgccgtcttaatatctctgtcaacagcgtaagatttttttctcaacagatatctgaccaaataaagagagtagacgtactttagggactagagaaaaacgtcaagattcctctcattctactccatcaaatgagactaattttaaatgagacataatataaaaaattatatataaaaatgcaagctttcaaagtatcagctctaaagctttattagcatttagtgtaagttatgaattaagatttccataaagagttggaaaaacttgacagaggaaaagcataaatgagtttacataaaaagaatttccagaaataatattcacttttacagctagtgtacacatgaatttaaaagagtataattacggacaacatcctaactctgtaacttaacagctgtgatgctagtccagttacttaacttttcctaaggtgcgaattccttgtttgtaaaatggaaataactctacctcgtaagtagcaaggattaaatgagataatgcatgcacagcactaaataagtgtctggcacacagctaacttaatgagtatttactattattttactgtatccctttcttcaaaatatgcccacccaaactgtcaagcagactgggttctgcattttcagggagtgtatatcgtttttactttttatcatgtttggaaagctaatcatacatactctcacttttccatcataaaattatcataatgggctacgaatcacactatataaaacacaaaaactttcttaaaatatgtttgcatgtcagaggcttgttaagaaaaacaacaaataaaaatatcctaaattgttcttcttttgagatatgaagacacaaagaagaaagtctcctaggttgatccttctgaagatcaatgacatttaataagtgctgattcttttaatcatgtaaaatttaaaaaaataagacatacaagtcaacttacttgatgaagatcatttcccaatgcatattctgcaaagtagcctggagcagcagatgaggctctaatggcctgccacattttatactgacagcctcccaaataatgagagttgattccaggaaaatgaccatagtttctgaacacaaaagctttgggtgttatccctctatttactatggtacttacagcagctacctagtgaatgaaaaagtgaacaattccatcattaacagtaatatatttgggatctgtaaaaattaaatactatttagtagtatgaatgaacaatctacaactatatgtgtaacaaatataatgctgaaaaaagagaatcagatctttttaaacaggcatttctttgtgggataatagatataaagactgaagcaattctgagaaatttattatgagaataataataaaagagatttatttgaccattactcaatttgattaaaaaaatattcaaaaaggcaaacatttctagacctttacataataattgacaaaacagtagtaatgaataaaaactgcttaaaggctgggcacagtggctcacgccagtaatcccagcactttgggaggccaaggagggtggatcacttgaggtaaggagctcaagagcagcctgcccaaaatggtgaaaccccaactcaactaaaaatacaaaattagctggacatgatggcaggtgccttccagctactcgggaggctgaggcaggagaattgcttgcccaggaggtgggggttggagtgagccgagatcacgtcactgcactccagcctgggtgacaagagtgggactctgtctcaaaacaaacaaaaaaaactgcttcaagataagcacactattttcataatatcacttacaaattagtctttgtttctgtgctctttgaaagtattttgacttcaataactctgaaatgtaacactacacaatcaatgctttcaggtcacaattattaaaacctggtagttgggtaatgtttattaaaaaactataatgtcaaccatctcaggtctcaaattttatcactgtcagttaaatttacatgaaatgtgctgttttattaatgatctgtaatacaaacttaagaggctgacaggtattgatgaggccaaagttagtgtcctgtgccaagtcctgccaattgttttgatatttaataaacaaaggtcacatgccaaattcctgtgagtaatccaagtctgtctctaggccactatggataggcgttggccatatactaaaatccagagtctttctatagttggcatataaatatggttggattaagaaaacatatgagtggctctccatttatcatgatgatttacttcttaagatggctaaagttccccataacttttattcaaaactgacaacttcataatttaaaccaagcaaacaaacaaggagccttggagatacaggggaacaagcaagaagcatagagtgcaccctagtgtcctctcaaaaagagctaagtcatctcttcatcacagcctctgaggccctgcgtctgatctaatcggcctactgctccagcctcattccacatgcagcccttggattccgaggcactaatctttaagaactctatcatttcctggaattctctataactcttcctgcacaggccattccctttgccaggaatgctgctactcaatggccttcacattgacatctcaaatctcacttccttaaattagctggccctcatgtctctttaaaaatatgctttcaaagaactgcttttatgctccatagcacttatgtatttcagggaaactactacatgtcatctgtgtgattatttcattaatacctatgttgccctacagagctgtgaaccccatgtctgcatttgcccacaaatgaatccaaagtgcctagcagtgggtgtataattaatacttgcagaatgaatcaaagtatgagtatgccatagttaagagcaacagaaagagctgcacttgtttgatttttcatggttacagttcgttatctgagaataaatacaagctgcatgaaatttctaggcacataaattctattctttaaacaagtaatattaaacagaactcaagcaacactcagatcattgggtttcaaacacacaaataaatgaagagccacattgagacacatctaagtgacattacaattttaatggggattcaatttttataataatataatctaatatagtcatgcattgcatatcaatgttttggtcaatgatggaccgcatatacaacagtggtcccataagactataaacgggcttctatgctgtatttttcactgtatctttctatagatattttttatctagatatttgtatatctgtagatacgtaagtattcttatcattgtgtcacaattgcctacagtattcagtatagtcacctgctgtacaggtttatagcctaggaactataggctataccatttagcctacatgtgtagtaggctataccatctaagtatgtctaagtacactctataacacaggtttatagcctaggaactataggctataccatttagcctacatgtgtagtaggctataccatctaagtatgtctaagtacactctataatacttgcacaatgacaaaataatctaatgacacacttctcagaatgtatccctatcattaagtgatgcatgattgtattgtatctaagaggcatataaaatttctctttaaaaatctagggtaagaaggctgggcgcggtggctcacgcccgtaatcccagcactttgggaggctgaggtgggcgaatcacgaggtcaggagatcgagactatcctggctaacatggtgaaaccctgtctctactaaaaaatacaaaaaattagccgggcgtggtggcggctgcctatagtcccagctacttgggaggctgaggcaggagaatggcgtgagcccgggaggcggagcttgcagtgagccgagattgtgccactgcactccagcctgggcgacagagcaagactccgtctcaaaaaaaaaaaaaaactagggtaaaaaatgtcataatgttccttaaatcactagatttgatttttaaaattatgatgaaataattcttattttcagtccatctttcatgttcttccatttctggtatagttttaccgaatttataaaaggtataaggatgatatcccatctcttcatagaatgactcaatatataaagaattaatacaatctgtaataccttaataaaagggccctcagggccgggcacgatggctcatgcctgtaatcccagcactttgggaggccaaggcgggcagatcacctgagtttgggagtttgagaccagcctgaccaacatgaagaaaccctgtctctactaaaaatacaaaaaaattagccaggcgtggtggtgcatgcctgtaatcccagctacttgggaggctgaggcaggagaatcacttgaacctgggagacggaggttatggtgagccgagatcgtgctattgcactccagcctgggcaataagagtgaaactctgtctcaaaaaataaaaataaaataaaataaaatggccctcaggacaagtgctttcaccagaccttcagatggaactaggtgttatatttaagagactctaagcttaccttaggacatgtggggtttcttgctgtttcaatcatcagtgcagatcccatcctatccctttattaaaggagaaaaaaataagttatatcaaaatgactttatctcctaacaaccaggaaacatacagtatgcaattactatttgtccatggctttgtcaaagtgctatgaaggaaaacatgtaagactctcctctaggaggcttataattccattaatgcacatgaaacaatatgcagttatttatcaacctctgattcaaactgcaagtatctacagttctgaggtggagcaacgaacagaggggcagtaactggaaaagatgcaggaaggttgctggaggaagacattgaaagactgcaaggcaacatatttaaagctaggacatatacagattaaaggcacaaaggcaaaataaatctgttgttttcagggtcctgccaataggataaaggagctgtgttgagataagactgcagaagtatgcacgggctagttagagtaaccaggtgaggacaatgagactttaagcttgttttagttggtaacagccaatgtcatcaagaaaatggctttgaaaatcatcagagttggcatttgaattactatgacattacagaaattgtccttgggcagcaatttttgcaattccataataagagaattttatttcaatgcagacttttccagacttaaaaattatgtattttccctatattgaatacaaagactatggtttcaccagccttcctcatgagtaaaaccattttctaatgtgtttttcaaacaatactcatgtttcccaactagaatattagtgaacttcataaaaagaatatttacaaactgctcagtgatctaccctttataagctttaataaatatcaatgtaaaatactttccaaaatggacaagatcttttgtctttcccaacctgatctatacatttctactacataaagatcaatgcattttatctttttaaggttctttgtcttttcacagaattcttactgtaaaattacaagagaaatcctaggagcatgctgatttcacactttttggcaaagttcatatttatttatttttatatttgtttaaatcttggttttctcaaaacctaaaatgcttttagtgaattcacttatgaatataaacttgtaaaaaaagcaatggtaattgtttatttccgagatgtcaaaatatgaaaaaaaaatcaacatgcctagattctactgatggcataaaatagttcccttaaaataacacaaaattatcacagcaaaataaataaataaataaaagtcctctcaataaacaatgggcgaaaaaatgctacgacaaaaaaggccagaaggtagatatagaagaatattaacaatactggcacccagtgaatcacagtcctggtatccatgtcattgtatacagtctcttcctatacagactcttggttggcatggctttcgtccatgtgacctcaacaaacatgccattaaactgaggcttgataagtgcttatgcactggggcttgctctctgggaactctgaaaccacaatgatgagacgaagcttgggtgagaatgaccaggtggagagagaggcttcccaggcccattggtagagccaccaagtgagctccggcaagaacagaagaaacacccagtcaaaccacagagtcatgagactaaatcatcattgttttaagccactaagttttggagtggcttgttctgcagcaaaggctgagtttgaaaaagcagagaaagaaaaaacaactaacgacactgataaaatttatcaatgccatgattaaaaataaagaagttgccagaagagcaaaaatgagacagcaatacataaatatgcaaagatactctcataagtaacaaaaggaaaaatttcatagtagagaagctggttttagaataaatttttaaattttcattaaataataaaaagtattgattgtatgaatactgggaatagatatgaattttatatatatatattttttgagacggagtctcgctctgtcgcccagactggagtgcagtggtctcagctcactgcaagctccacctcccaggttcacaccattctcctgcctcagcctccccagtagctgggactacaggcgcccgcccccatgcctggctttttttttttttttttttttttttgtatttttagtagagatggggtttcaccgtgtaggccaggaaggtgaattatattttctaattgacacaaaagatgtgaaaataagtaacatacaatgataatggatgggaagctttcacgattggaaagatgtcaatgttccacaaaataagtgatacatttcatgtaatttccatccaaataccagtggaatttttttttatgtgataaaagtagcctaagattaactttgaaaattaaatgaaaattgtgtaaaagaataatgagaaaagatttgctatgctgtatcattataaaaatattatgccaaggttcaacaactaaatctacagaatttgtacgaaaataaatccacagagaaaccaaaaacttgaacacagattctaatatagataagaatttcaaatatgataaagatgatgtttcaaatcagttaaataaatggagctgggacatttggattaacatctgattaaaaaaaagcttgattctcttacaacacatatcaaaataagttttaggtaacttcagaattacatataaactgaaaactttagaactaggaaataatacaaatatttacctaccttcagagtagaaaagacttatttatttatttttaaatttaaacttttagtataaagagtatgcatgcaggttttgttacatgggtaaactgtgtgacactgaggcttggggtcccaacaatcctattacccaggcagtaagcacagtacccaacaagcggctcctcagctcacactcccactctccctcctgtctaatggtccccagcatcaattgttcccatccttatgttcatgtatattcaatgtttagctctcacttataagtaagaagatgtggtatttggttttatgttcttgtgttaggttgcttattctaatggcctccagctccaaccacgttgctgcaaaggacatgatttttttttataactgcatagtattccacaatgcatatgtgccacattttctttatccaatccactgttgatgggcacctacctaggttgattccatgtatctgccattgtgaacagtgctataatgaacacataagtgcatgtgtctttttgacagaatgaattattttcctttgggtatatgcccagtagtaggattgtagaaaagacttaaaaacataaaagttaaaaatcattaaaggaaaagatttggctaaatgaagatgtttcaatcctctacattaaaaaattattagcactttttcaatatatggttaatatatttacaatacattgaggaatatcccataagaaaataggcaaaaattatgccctcaaaattcacacacaaaaaataaaaagccatcaaaaaccaaaacctttttttaagtttaaactcatcaataatgaaagtgatacaaattgaaacatgagcttcaaaatctctcaaactgatgtcattttaaaaattaagtgtttggtgttcacaaatatttcatgaaatagaaatacaaattgatgttggcagatgaataagctaaaaccactgtattgaagaacaaattcagccatgtatgtatcaagattcttaaaacatgcatatcctctggcccacaattttacttctagaaatttactttacttaaagatatagccagagatttaagtaaagatgtttatctaaattttattttgaactgcaagagtatctgaagtatccttttctaagagaggatttgttaaataaaaaacagtatatccataaaatggtgaagaaccattaatatatgtttcaaaaaatattaactgacataggaaataatctgtgcattatctgaattttgtaaagagaatggatacacacacactcacaactacacacatatacacttgtctatctgtaagaaattacacaaaaaacacatcaccatgttaatagtgcttttgttcttagtgggattataaattatttttattgttttctcgatatattttctatttcctatataataattattttaagaagacatcaacattggacccaataaatatgcttcttatatagtgacctactaatatattctgaaatgtgagaagaaatttaaagttttctatgacagcattgttcataatcccaaaaaattaggaacataaatgtcgtaaatgtccataaaaatcctaaatggaaatgattaagaaagtgtaacatcccactctggagtacagtgtagtctttaaaaatatgtcaggagattttaagaacgtttgaaaaaaggagaaggatacgaatttacaactacaatctaatatcagctatacaaaatgtataaggtctaataaactagaaggagatatattaaagtctacagctctgaataacaggattgtggatgattttatgcttatattttatgattatatatactttgggaggcaggccaatcacttgaggttaggagcctgagcaacatggtgaaatcttctctctactaaaaacagaaaaaattagctgggcatggtggtgcacacgtgtggtcccagctacttgggaggctgacgtgggaggatcacttgagcctgggaagttgaggctgcagtgagccaagatagcaccactgtactctaccctgggcaacgggagtgagagcgtgtgtcgaaaaacaaataaaaataaaaataattgaatattttagaatgacttgagacacatttaatatgttaagtaaaaacaacaggatgcaagtatctcatatttttaaaaaaggcaattgcaacttttacatgcaaatctcacacacacaaaccccccaaaacaattactaaactatgattcaccaaaatactaacagtggttatctctaattagtcaaataatttaatattcttgatatttttcaaattataatatgcaagaatataatttaatattgacatttttcaaattataatatgcacatactacctatataatcagaagatttaaaaagagtaattgtaacttacttaagaatgttttcccatgtttgactgtcataaaatgcatggctccaactcatttttactgttccaacaatgacattttgtgaaaatacatctgatcctaattttcgataaagttcctcacattcatccaagggcatatgaaacaaccccaacatgaaagctaatatggcacctggaaaaaagaatccttagcttttatcagtgttaagttatagcccttatgatgtaagatttcctgaatcatagttttggcttaaattttagcgttgatactttctagctatgtcacctgggacaaatgactttccttctcagagccccatttgtttcaggggtaaaatgggagtaataagaacaaccaaaattcatgtgtcttactgggttaacaaatgtaaagggatttaccaggtctcaaaaaggattaaataaatgctacccccaataatgataataataataatttaaaaatatttacaaatgtgttgttttacattaaattatatataagatactatggtagataattcacgttctttctaacatcaatgaattacttagttttagtcacagaatatggtatatttgacaactcaccaaatcactaagcaattctccttcaagttagtcctaggaaccaatgtaattaaacatattaggtactcttggatgtccttttaaacagctgattccatatctagctataataggtaggacacactgccacctagtgtgcctaactggcataaccatgaacaaaagacaaaaaaggaagtacaaaattttggggtatggagagagggctgaagaaggcaaaggactatgatcttaaacataagtgcttaatgttcttttccttaatgtactgccagaatgcaccacttccatataataataattacctgtgcttacaccacaaatgtaatcaaagagctgatgaactggcttctgagtaagttcaactaattttcgtagggtctggagagcaaccacgcccctacagaaaagattaaagacaaaatgacaattcctgtttaaagaaaaaataatttaagctgttgaataaaacaatctaataattgcttttagagtttatatgctaacatgaaaattaataatataaatcaaaatcagtaaaaattgcctgtccaaatttttagtattacttttgaaaatctaatatctaaatgataaaaaaacctacactaaggcagcacattttaaaatttatattagtatctctctcttgttttttcactgaacccatccttctgcagaacagtatctctttaagaataaatctggccaggcagtggctcattcttgtaatcccagcgctttgggaggttgaggtaagaggatcacttgaggccaggagttcaagaccagctgaacaatatagcgagatcccatttctacagaaaaaaaaaaaaaaagtaaaaagaagaagaaatccactcaaatacacttcttaagaatgccaaaaaccaacaaacaactaaataagaatacaaagatatgccaatataaaattgaaaaaaaaaacaaaaaacaaaaaaaaaaacaaaaaaaactggaaaacacttaaaaactcactcactggttttggaatgccataccttggtttcctctcttactaacatagttggtcacctatgactctatacatttttgtcttacatatttcaccagatttttttttttgagatggagtctcactctgttgcccaggctggagtgcagtggctcactgggctcactgcaacctccgcctcctgggttcatgccattctcctgcctcagcctcccgagtagctgggactacaggagcctgccaccatgcctggctaatttttttttttttttgtatttttagtagagacagggtttcaccatgttagccaggatggtctcgatctcctgacctcatgatccacccgcctcagcctcccaaagtgctaagattacaggtgtgagccactgcacccggccaccagtcagatttttaagctcccttttctttattcatttttaaaaactctcaataacttcaggttaaccctctatattaatggtatattaattaatgttgctgactttgctcatttctgaatccttgccaacagcagttaatagcttcatgaaggaatgcgaaacgatgaaaaagcttaggagatatagaccaattgagggtgtatgtaccatgtaaactgtcatgtgtgtatcatgacaatttttaacagtgggagaataaaaaaacgatgaaaagctctattcccaacacaaggtagggggtaggtaagtcctggaacacaaaggtagttaggcatcaaaaaattttgagtgtcaaattgtgcttgataatgttaacaagaagtaactagaaaattatgtaagattaaagtagaaaaccaaagatgctgattttttaaatacaacaaataatgtgcatttgaggagagttaagatatcttatgaaagaggtacattattaattcaagacaagacatgatgaattaaatgtaatgctggataaaatatatttaacaatgtgacctctattatcacaaaaaggaaataaaataggcacgtatatgttcacacagaaaaagattagaagaaaataaatcaaaatactaaaataatcttaagagttgtgagctatggttttggggtttttttctctctcaggtttttctaactactcgtataattgggaaacttaactatttaaaaatgttgtactcataaattccgaatgaatttaaatacgtatatatctgccaagttgccacagctgtctgtgtctaccactgtaggttctcttataacaaagaagtcaaagacagggttttttattttttctctcaatccctcatacattactgctttccgcacaaacctcccatctgggctgctttcccatattcccctaaaccaagttttctcaacagcagaaccgctgacattctgggttggataatctttgttttgcggggctgtcctgtgcactgtatgatgtttagtcacaactgtcctcttcaaactagatgcaagtggcagtgctctagttgtgacaactaaaaatgtctccagacactgccaaatgtcctttagggagcaaaatcacctccagtggagaattactaacctaaacctaacttcatcctaacccacccctagattttcccaaattacctcacactgatttcctccctatatgactaatacaactcttattctacaagataaactatttattggatacaaacttctttttcatcatgcttgtctgaccttagacatgtgaatgttcttcaattttcttccttccttcctatctctacataaatataacttctttaaaaagaagtcttggtcctgagcattctttaaaatagtactcttcctctctatccctttactttgctttatttttcttcatagcacccagaataacatatttttgtttttctatttgttgtcttttccttctctacaatgcaaacactgtattgttttgtttgctcactgtccccaggatctaaatcagtgcttacaacatagtaggcccccaatatttgttagctgactcaatgaatgacactacctgtcccaactcccctgaacattatggcagagaggattccttctgctccttagtgaaatgcccctactcatttaactgccattttccctatttttcaccatttggaaccaattctatgaactagaataatctctccagttatcactttatctgtatcacatgaatgacatacactttcttaagattatttcactttcctgagaaatagcctctaagatctttaaagatttttctctcttcagtgggcttttgccaaccgagcacttctgtatggatataatcttatattaaatatgttcaagaaagaactgtctttcctcaacaccaatctgttgagattccctgcagttttgtcccagtcacacacaggtttactgttagagtgatcttgacctatgtctaccatatcctgtctccgagtttcttaaaagttactgatattggcatggtggctcacacctgtaatcccagcactttgggaggccaaggcgggtggatcacctgaggtcaggagcttgagaccagccttgccaacatggtgaaaccccgtctctactaaaaatacaaaagtagctgggtgtggtagtgcatgcctataatcccagctacttggggaggctacagcaggagaactgatcagttgaacctgggaggtggaggttgcagtgagccgagatcacgtcactgcactccagcccggacaaccagagcaaaactccgtctcaaaaaaaaaaaagttactggtacatttttccttcctcctgccttccactgccaccatctgaggttagcttccttctctcagtacttattccttccttcatattgatgtcaaagtataaaggactcgggtgaatacagaaccaaggaatttaacaaaaagatacagggtagtacttgaacatacagaagagtggttggcaagttggttataccaaaaagcaaaatcagagaggtaagctaaacctaagaacaataggcagggcatgtactatgaattacaaggtaacagtagagatggcagggaactagagaacaagctagaagattttggggaaaaggtttgaaaaaccaagccaaaaaatctaaccaacaagttggaaggaactagataaacaaagactgagtaggaagcatggatggattgccagtagtaaaaatagagcttaatagtgaaattatctccttctgaacaaagaaagaatttatttcttatatggcaccagaactggcatctccaagtgaagacatcagaagtcaggaagttaatatagcctcattttgtaaccatcactttatcaagtaactagttgatatatatgggtaagataagtgtaataaaagaaagctggctgggcgcggtggctcacgcctgtaatcacagcactttgggaggccaaggcaggtggtttacctgaggtcaggagttcaagaccagcctagacaacatggtgaaatcccgtctctacttacaacacaaaaaattagccaggcatggtggtggacacctataatcccagctgcttcggagactgagacaggagaatcgcttgaacttgggaggcagaggttgcagtgatctgagatcgcaccactgcactccagcctgggcgacagagcaagactctgtctccaaaaaaataaaataataaatgaaagctaaaattataaaacactgtcaaggttttatgagaataatggttgataagcttctgaactaccaaaaaggtctaaaaaggccaaatataaaaatataaatactaaaatcaaatcaaatcaaatacaaaaatataaataccaaatcaaaccaaagaactgaagtatatgtcagagtagcacttagattaataaagtattaattaaaacaatttcatgttttattttaaaaatttgattttatttatatcaaatctttttttttttaattcctaaagctgaattgaatctgtagtttttaagaatcatgttccagctgggcgcagtggctcgcgcctgtaatcctagcactttgggaggccaaggcaggcagatcacctggcgtcaggagtttgagaccaacctggccaatatggtgaaaccctgtctccactaaaactacaaaaattagccgggtatggtggcgggagcctgtaaatccagctacttgagagggtgaggcaggagaatcgcttgaacctgggaggcagaggttgcagtgagctgagattgtgccactgcactccagcctgggcaacagagggaaactccatctcaaaaaaaaaaaaaaaaaaaaaaaaaaagaatcatgttcctagccttaccttgttcctccaccatcaattgagagaattcggattcctctccctttcactggatccacatagccaattagggccaaaatttctctaactgcagcctgaagagtttcatccttaatttgtctcagtcgtaataaatatggaataattctttcctatattgagagaaaagatactttgttgcttttgtcaaatcaagactgaaaatgtatgattattattaaccaatacatgcagttcaccacatgacaaccaaggtgacagtgttcattactttctcagtaatcttataagacagattagtttttgatatattaatgtcaattttctagattacatttgttctaatattgaggacaaaaattaaccaatattcaaaagttttcattaaaagatgtaatacttaactagagaaaatataatttatagaaatttacaaattattataacaaaaggttaacattataaattttgtataatatttagtccaaatcctgagattaagaggctaaaactgattcacagtaactactagaagttaaactgttattaaaaagaaataatgaaccatcttgtatacattgcatatgggattcaaggttgcctcataaaagaatacaaacaaatgttaacaaaggtaactgaggtgagaaggtaaaagcaggccactacaattaaataatcagtttaaataaacctgagacttcaagattctaagcactcaacatcatattgttgatcacagacaagagcttaaatcctagagttctatgttgcttaccaaagattctctagcttctgtacacagaagcatcttacatagtcagtaccgcaggtttaatggaatggctgagtggcagctataattctgctgtgcaaccttctgtaaatcaaacaattttcctaggtatcactcattttgtttcttttttatgatcaatcaacctgaaatactctaaattctttctcaatattttttcccctaatattgagctgtgaggccccactagaggaacttgagcaatggtggagaataatgcaaatttccatttccggttaagatgaaatactctgttacagatcaacgctcacatcaacaacaagaaaatcttgatgaaatacaagaaaagtaccatctgtttaaaggcatcagacagagagctgctgaagcaacaagaacagatggagccaagaatctggagaaggagtaattgctaggaagtgagctggtaaactatagcttttcttcccttgaggcatttgctgattccaggaaaaagtaaaggaccaaaaaagtgagtctgactcagacagagggccccaaataaaggacagagaaaccagctgatcgtttagcatctaaggggtttggagtgaaaaaaatggaagacctgaagggcttcaaacacatggttggctttacctcaagacatttgctgaattctaaaatcatgaggtgtggaaggcaaaaggtaagccgaagacctctgaaaatcagagtggaaggctttgtattcttgagattttaggacccaatgagatggtggttaagtgaacacaccctggaagaatatgcccaaaaatcagggcaaactagaggtcttacccaaactgtaatacagccttgatccagatttgaccctaactgaattaaggctatcagggctccactcaaatgccaaacagaagaacaaataaaccccagaaaaagatataatttgatataatctagagcttatgcaattttttaaacttacaatgtccagcatccagaaaaactataacgtatgtgaatccagtaccgaattacaaaaaccaagaattgatgttcatattagaattaccacaaaaacatgttgaaataaaaataacaaaataaaattatcaaaatatatcagatacctatgaattagttaaataaaatcattccaatggaagatgtaaaagacacccaacactgaaaatttttaaaacacaggaggaaaataaagatgacccgaataattgaaaaaatatgccatatgtcatggcttggaaactcaacaaagacccaattcaccctaaattgttccacatattcactgcaatcccaccatgtttttctcttttaaaaatttttttgtagataaggtgattctaaaattcatatagaaatataacatgtcaagaatagccatgccaacaacattgagaagaacaaggttggaggatttatactacctaggtttatacagctgcaaaaattgagccagtgcactatcagcacaaccacacacaaatataccagtggaacaaaatactgtgtctggctgggcatggtgactcacgcctgtaatcccagcactttgggaagccgaggtgggtggatcacctgaggttgggagttcgagaccagcctgaccaacatggggaaaccccatctctactaaaaatacaaaactagctgggcatggtggtgcatgcctgtaatcccagctactagggaggctgaggcaggagaatcattttaacctgggaggcagaggttgtggtgagccaagattgcacattgcactccagcctgggcaacaagagcgaaactccatctcaaaaaatacataaatgaaaaatactgtgtctagaaacagatccatatatacatctcatttatgataaaggtcttttcaataaatggtgctgagtcaactggataagtgtattttttaaaagtcaggacttctgacacacaccacacaaccaaatctattctagatgaatactagatagaagagtaaaaggcaaagcaaggtttcagaagaaaacacaagaaaatttatatatatatatatatatatatatatatatatatatatatatatatatatatttttttttttttttttttttttttttttgagacggagtctcactctgttgccaggctggagtgcagcggcgtgatctcagctcaccgcaacctccgcctcccaggttcaagccattctcctgcctcagcctcccaagtagctggaactacaggcgcacgccaccaagcccagctaatttttgtatttttagtagagacgaggtttcaccacgttggccaggatggtcttgatcgcttgatctcgtgatctgcccacctcagcctcccgaagtgctaggattagaggcctgagccacggcgcctggccaaaaatacttttatgactttaggataggcaaagatttcttaaacaggacacaaaatactaactataaagaaaagtatttataaattggacaaaattaagaatatctgttcatcaaaaaacacaagagtgagaaggtcagccacggaataggagaacgatttgtaagacatacacatacataccgcacatatgacaagtgagttacaaccgtaatatatttttaaaattctacaaataatgaagaaaaagttggtgaacccaatggaaaaataggcaagatctggaataggtacttcacaaggaagtataaacatggccaataaaccctggaaaagatgctgaatatcatagctatcaatgaaataaaaaattaaaaccataatttagtatcacttaacacccaacaaaactgctcaaattaaaaagatttaaaaaggttgggcacagtggctcacggctgtaatcccaatactttgggaggccgaagtgggcagattacttgaggtcaggagttggagaccagcctgaccaacagggtgaaaccccgtctctactaaaaaaccaaaaattagcagggtgtggtggtgcgcacctgtaatcccagctactcgggaggctgaggcaggagaactgcttgaacccaggaggcggaggttgcagcaagccgagatcgcaccactgcactccagcctggacaacagagcgacactcagtctcaaaaaaaaaattacaaaataaagtgttggagagaaagtagaacacagaggcctcatagaattctggtgaaagaataaattggcacaagcactatgcaaaaccatttggcagtatctactaacgttacaaatatgctcactctgtgagcagcaatagtactcttaggtatatactccaaagaaacgaagacctatgttttccaaaagatataacccagaagtactactactaaatattcccaaactgcaaaccatccaaatgtctagcaatagagggaaaaatgaaaagtatacccaacaatatagaaggttctcacaaacataatattgagtgaaaaaaaaaaccagacatataagaacacatgctgtataattcatagaacatgcaaaaagaggcacaactaaattatgctgctagaattctgaaaaactgatcaacctttttgggaacagtatttggagtgttcataagattgtttctcattcagggtggtggttatatagatgtatttcatgtgtgaaaaatcatggaactgtaaacttacgatttgtgttgttctctatatataatatttttataaaaagttttttaataaacccaaaggatgtatgaatccttgtgacaaattcagcattttaaaaaagagaaggggagaaaatagatcatagaaacaggctcggtgaggctgggagcggtggctcacgcctgtaatcccagcactttgggcggccgaggcaggtggattacctgaggtcaggagatcgagaccatcctggccaacatggtgaaaccccatcgctactaaagatacaaaaattagctgggcgtggtggcgggcgcctgtagtcccagctactcgggaggctgaggcaggagaatcccttgaaccccggaggtggaggttgcagtgagctgagatcacaccactgcactccagcctggtgacagagtaagactctgtctcaaaaaaaaaaaaaaaaaaaaaaaaagaaacaggctgggtgaggtggcttacacctataatctcagtactttgggaggcaaggcaggcagattgcttgagcccaagaattcgggatcaacctgagcaacatggtgagaccctctttccacaaaaaatacaaaaattagttgggtgtggttgtgcatgcctgtggtcccaggtactcaggaggctgagctgggctgaacctgggaggcagaagttgcagtgagtgaagactatggcactgcattccagcctgggtgacagagactctgtctcccaaaaaaagaaaaagaaacacatttaacttagaaaaacaaggagtccataatattttttttaaaggtgcaaaaaaattcatttaatcactgaggcagctattaaagcaacaccttactttgaaaaccggtaactaaaatactggcaaaccgaatccagcagcacatcaaaaaacttatccaccatgatcaagtgggcttcatccctgggatgcaaggctggttcaatatacgcaaatcaataaatgtaatccagcatataaacagagccaaagacaaaaaccacatgattatctcaatagatgcagaaaaagcctttgacaaaattcaacaacccttcatgctaaaaactctcaataaattaggtattgatgggacgtatttcaaaataataagagctatctatgacaaacccacagccaatatcatactgaatgggcaaaaactggaagcattccctttgaaaactggcacaagacagggatgccctctctcaccactcctattcaacatagtgttggaagttctggccagggcaattaggcaggagaaggaaataaagggtattcaattaggaaaagaggaagtcaaattgtccctgtttgcagacgacatgattgtatatctagaaaaccccattgtctcagcccaaaatctccttaagctgataagcaacttcagcaaagtctcaggatacaaaatcaatgtacaaaaatcacaagcattcttatacaccaacaacagacaaacagagagccaaatcatgagtgaactcccattcacaattgcttcaaagagaataaaatacctaggaatccaacttacaagggatgtgaaggacctcttcaaggagaactacaaaccactgctcaaggaaataaaagaggatacaaacaaatggaagaacattccatgctcatgggtaggaagaatcaatatcgtgaaaatggccatactgcccaaggtaatttacagattcaatgccatccccatcaagctaccaatgactttcttcacagaattggaaaaaactactttaaagttcatatggaaccaaaaaagagcccacattgccaagtcaatcctaagccaaaagaacaaagctggaggaagcacactacctggcttcaaactatactacaaggctacagtaaccaaaacagcatggtactggtaccaaaacagagatatagatcaatggaacagaacagagccctcagaaataacgccgcatacctacaactatctgatctttgacaaacctgagaaaaacaagcaatggggaaaggattccctatttaataaatggtgctgggaaaactggctagccatatgtaggaagctgaaactggatcccttccttacaccttatacaaaaatcaattcaagatggattaaagatttaaacgttagacctaaaaccataaaaaccctagaagaaaacctaggcattacaattcaggacataggcatggtcaaggacttcatgtccaaaacaccaaaagcaatggcaacaaaaaacaaaattgacaaatgggatctaattaaactaaagagcttctgcacagcaaaagaaactaccatcagagtgaacaggcaacctacaaaatgggagaaaattttcgcaacctactcatctgacaaagggctaatatccagaatctacaatgaactcaaacaaatttacaagaaaaaaacaaacaaccccatcaaaaagtgggcaaaggacatgaacagacacttctcaaaagaagacatttatgcagccaaaaaatacatgaaaaaatgctcatcatcactggccatcagagaaatgcaaatcaaaaccacaatgagataccatctcacaccagttagaatggcgatcattaaaaagtcaggaaacaacaggtgctggagaggatgtggagaaataggaacacttttacactgttggtgggactgtaaactagttcaaccattgtggaagtcagtgtggcgattcctcagggatctagaactagaaataccatttgacccagccattccattactgggtatatacccatatgactataaatcatgctgctataaagacacatgcacacgtatgtttattgcggcattattcacaatagcaaagacttggaaccaacccaaatgtccaacaatgatagactggattaagaaaatgtggcacatatccaccatggaatactatgcagccataaaaaatgatgagttcatgtcctttgtagggacatggatgaaattggaaatcatcattctcagtaaactatcgcaagaacaaaaaaccaaacaccgcatattctcactcatagatgggaattgaacaatgagaacacacggacacaggaaggggaatatcacactctggggactgtggtggggtggggggaggggggagggatagcattgggagatatacctaatgctagatgatgagttagtgggtgcagcgcaccagcatggcacatgtatacatatgtaactaacctgcacaatgtgcacatgtaccctaaaacttaaagtataataaaaaaaaaaaaaaagaaagaaaaccggtaactagctctttttccggctggaaccatggtgggtgtagaagagaagaagaaggttcctgctgtgccagaaacccttaagaaaaagcgaaggaatttctcagagctgaagatgaagcgcctgagaaagaagtttgcccaaaagatgcttcgaaaggcaaggaggaagcttatctatgaaaaagcaaagcactatcacagggaatataggcagatgtacagaactgaaattcgaatggcgaggatggcaagaaaagctggcaactactttgtacctgcagaacccaaactggcatttgtcatcagaatcagaggtatcagtggcgtgagcccaaaggtccgaaaggtgttgcagcttcttcgccttcgtcaaatctacaatggaacctttgtgaagctcaacaaggcttcgactaacatgctgaggattgtagagccatatattgcatgggggtaccccaatctgaagtcagtaaatgaactaatctacaagagtggttatggcaaaatcaataagaagcgaattgctttgacagataacgctttgattgctcgatctcttggtaaatatggcatcatctgcatggaggatctgattcatgagatctatactgttggaaaacgcttcaaagaggcaaataacttcctgtggcccttcaaattgtcttctccacgaggtggaatgaagaaaaagaccacccattttgtagaaggtggagatgctggcaacagggaggaccagatcaacaggcttattagaagaatgaactaaggtgtctaccatgactatttctctaagctggttggttaataaacagtacctgctctcaaattggaaaaaaaaaaaaaaaaaaagaaaactggtaactaaatacaaataaattaagcatttctctttcctttcctgtaaaatttgtaaaatttgcctttgagaatacccaaatagcttcagttgatgaaggaaggctcttctttacagaagaatgtcaattataatgtaggagtaacagaattagacattggtcattctgcaactctaatgaaattattagttctggaaatgattaggttaatggttgatgagataatgcttctagcacaattgtccaatgagaagcagattgtcatcactttaacacggtggtcatccttagcattactaatggttgttcaactaattgtcatgtgtgtcttgatatgatgcattatgaggcacatgacattacctacaatgtgctctaacaacaaaatgtttaactcaatcaagccattatatttaaattccagtgttcaggaaatgaaaaggaaagaggaacacttcaaataacactgagaaggaagaaggcaggtacatccagaaagcgagtctttctgcctgttaaccagcctaatgtcttcaattaaatcagttttaaaggtgcaggtgaagaaggtgtggctgaaggactgcgttatattttaagtgacttggagaaatagtcagatgcaatgtgtgatctagactgaaccctcatttggatctaatcagttacataaataacattttcaaactgggtacaggataaagggacatttactgatatagaaaggtatacattatatgctaaaaaaccagattataaaacaacatatacagaatgagtttattttggtatatatgtgcatagaatgatttctgaaggaatactgtgcagacattactaatgttcaccaatacactgtttgcttccccttccaagcatacagaaggttgtacttttcaggcccatgcaatcggacaggataaacagattgtgagtagaagaaacccgtggcaacttctgctgaaatattatttccttgccacagaaatcagagaggaagactcaattaaaatacagacaacaggacaggatctaagtaaccaccacacggaggttcactgtgccaaagagtcacccaaacccacagttaactttgcatgagccagaaataaaactgttttgttaagtcactgagatttcggtgttgtttgctattagagcttaaggaagcttaatccaatgaacacaaataaactctaatacattacagtggtaatctgagggtaaaatatattatttttattttcttatcttttctttcttctaattccctacaatgctttgtgctgccttctttctaaacagtcaaagttcttctttttaattaaaaaacataatgaaaggagaccaccttcatcacagtgaaaaaattatcacagacaattccctaaatgtggctgccataaatgtagcatacaaaataagtaactcatttttttttagggcattacgtatcagacataattccctgtatttagctaccttaaatatggtagacacataaaaaagtaaaattgatacagatgttttataaaaattctatcatttttaaaaagctcaactcttgataataacaaaaagtttagctggaaaagttcacactagagtgtacatgctgacacgttatatgcaatttgtccagttcactgtttttcagatgattatttaagggaagggtgacaacttttttcagactacctagatttttattcataattgatctgaatatatattcctatattacattttttcatagtattgaaaggtccttagatttgggattagttatgcaagataaaagagtcctcagagtttcaattagcaagactatttaaactgcaactgaaaactactcagaaatccatcagtagtacaactggccttgtaaaagaggttgaagtgagccaccttgccccttctgccatctaagtaggtcatgagaagctgctgtctaggaggaacgggactctcaccagacatcaaattgttggtgccttgattttggactgcccagcctccagaactatgagaaataaatttctgttgtttataaattacccaagctaaggtattttattatgacagcccaaatggactaagccagtatgtaattctatttaagatctttgctttcagtatatcactgaaatgtgaaatatacttaaaagcatatgtatatttgagaatcttatcttttatgtaagattatataaatataaaatataatcccaaattataggaccataaaatagtgaagctacctataataatgtatgtgttatacaatacacaagtaaggatgggtacattattcaaagacaatttttcaacaaggtaattgttaaaaagtagaataaatgtgttctaagttaaaacaattttctgaatgccaagctaaaaataagcactaatagatttctaatgaaatgtaagcagtatctatcattatgatattttcaaatttttcattaaatattacaaataatcttaataatatagatgtaaagagactcaatcacattagtcatattttatagcacttctctgaaaacagtccatttaagtgggtctaaattatcttcattattttatagttgaaaaaactgaggcaaagaaaagctcattgttttacttaatatgattactaattcaattatgagtaaggtcattcaaatttttagactttcaaatacgaaaggaccatgaaataaaaacaacagcctcacatatgaattatgtctcctatcttaaaagaacagttacatagtataaatatttacattgcactaaagaaaaatctggcagctgttaggcaattcaactaataaactgattattttctattttataaatgtttaatttcaaagtatacatattggtgctaacaaaataaaatgaattgattagcataatgtatgtcacaaaataaatagggtaattactgaatacacatcacatgtataataaaaaccacaaaattcaaatggaaaaatgaaaggctttgccttctccattttagattttttttagtacttctattccaagacaaaactagattaaataaattagaaattaccttgacagccactccttttccttcaggaaattctagaagatgaaaagtcagttcttcaaccctagtaatgcagagctttgggtcagttgttcttcttaatgcctgaactaatgcccgggtcctgttatcaatactcacccttgcgataatctacaaagacatattaaatagatatgattagaatacaaaactgctctaaagaacaatgaaagtttcttagttctcattaggaaataaaacttataaatttgacaaaaagtaatagaaccgaaaagcacactgaacaacttgccttttctcgctgaagagataaacgctttttctcctctgcatttctgtctttgctgacagcctgatcagttttagcaggctcttcctgttcttctgactgactctttgaatcatactttaatttggggacaagtccaccaatataaccacctactaaagcttgtacaccttccgtgggacgagaaagaaagttagcaatactttgtttagttgaaacttgaagaacatcaggtatcgcagaaggacttgtaggcttgtccaccgtatgtacagattctgagcctggcttataagccaggatgccaggatctggagatcttaatttcccctcttctacctttttatcttcaagttctgatttgtcccggaaatgttcattttccttttgttgagacattttttccttacgtttgaaatatgaattaatatgatttgataaaaagtagaatgagtctccaaattttgtggttatagaacttgtgtaatgaaaaagactgcgtttacctatatcttcttctttgtctataatgtgacttttctcttctggaaaaggactcttttctgctgatttgtcactatattttttcagagatttgatggcttgtttgatgtttttctgttttaaccagccactatccgatacttttcttaaaatttgggaacttggcttaaattgagctaaacgtgaaatcatttcattttgattgccaaaaacagcctttgaaacagagttcaaagtacttttaatacgggacatacaaatgttcacttttgtaagtcccttgggagcagaagtgctaagtttcaaaatcccaatatgtaaaccatggttgcttggagagtaacagtgcttactgcaagaatgtgcttcacttttggtccatttacatcttattatgtttgtatgaaaacctctttgtagactgatgtggcttatcctccagtaatgcttaggtgagaacaagaaatacagttgcttgcttctctgcttcccacaaacacttcttgcattactaaggaggtaaatatatatatctacagtcagattaatagacataacttaaaaatcatttattttctatgacattctctcacttcttgaacgcttcatttaagaaatgccataattcatggtcttacctgaaatggcaagaaaaaaaattagaattcaagttaaaaattgaaattgggtataacagaaaacacaagactatttggactaaactcagcaagctgtctcaaaaaaagcagacaaaatattcctattatagctgatagaaaattcatttttaagctaatagaaaataattcactttcagtatagaggtaaataaaaaaagaaaatgaggaatagaatgtttagggagaagaactaatttagggaagtttcccaatagataagtcttccgttgcacaacacataatttaatatgcaatttagatactatgcttttttttcccttcctcattgttaaattctggactactttatgtgacactagactttaattccttgaagaaaaaggtcaggtcttatacattattcattgcaaacgatttatagaatacttaatctataccagacatggtgctagatgctgaagccacacagttacaggatatgaaagaatttccagactagagctgctgatagccatgtgaaaaagatttcactacctaagtaataagtgctcattaaatcaagtaagtcaggctagaagaaactacagcatataacatagaaggggttcttaaccactatgtaaaaagaacacatacaaataagaaaagaataatccaatttaaaaatgtggtattggtaaaagaaaagacaaatagatcaatggaacagaatagagagtccagaaacagacccaattaaatacagttaattgatctttgacaaaagagcaaaggtaatacaatggggcaaaaatagtcttaacaaatgacaactgacatctgcatgcaaattaatctagacacagactttatacctatcaaaaaaattaactcaaaacagattacagatctaaatgtaaaatgcaaatgtataaaactagaatataacataggagaaaacttagatgaccttaggaatggcaatgactttgagacaatatcaaatgcacaatacacaaaagaaaaaattggtaaggtagacttcattaatattaaaaacttctggccaggcgtggtggctcacgcctgtaatcccagcactttaggaggctgaggcaggcagatcacgaggtcaggagttcaagaccagcctggtcggcatggtgaaaccccatctctaccaaaaatacaaaaaattagctaggcatggtggtgcacgtcggtaatctcagctactcgggtggctgaggcagaagaatcacttgaatccaggaggcagaggttacagcgagccaagatcgtgccactgcactccagcctgggtgatagagccaggctttgtctcaaaaacaaaacaaacaaaaaaaaaaccaaccttctgctctgtgaaggtcaatgtcaagagaataagacaacgaggcagagattgggaaaaaatattttcaacagacatatctgataaagagctgtcatccgtaatatccaaagaactcttaaagctcgacaataagaaaacaaactcaattacaaatgtgccaaaggccgtaacagacacctcatcaaaggagatatatagataacaaataaacatataagaagttgtaccacatcatatgtcatcaggaaaatgcaaactaaaataaccatgatactactacatatctattagaatggccagaatacagaacattgagaacactaaatgctggtgaggatgtaaagtaaaaggaactctcactcattgctgaagaaagacaaaatggtacagccactttgaaagatagttcggtagcttcttacaaaattaaacatactcttaacatgacccagcaatggtactcctcgatatttacccaaaggagctgaagactaagtccataataaaatctgcacgaggatgtttacagaagccttattcataattgccaaaatttcaaaacaacaagatgtattttagtaagtgaatggataaactgtggtacatcaatatacggtatgtgtatgtgccacagacagacaatggaaaattgttcagtgctacaaagacatgagctatcaagccataaaaagaccgtgagaaacctgaaatgcatattactaagtgaaaacagccaatctgaaaaggctacatactgtgtcttagtctgttcaggctcctacaacaaaatcccataaactggggagcttacatatatatgtaatatggggtgtctgtgtgtgtgtgttttatagagacagggtctcactctgtcacccaggctggagtgcagtggcatgatcatagctcactcactaccacctcgaactcctgggctcgtgcaatccacctgcctcagcctcccaagtagctgggactacaggtacacatgcctggcttaggtagcttataaacagtagaaatttatttcacacaaaatttctcacagttctggagactgggaagtccaagatcagtattaacagatttggtatctgctgaaggcccacttactggttcacagatggctgtcttcttaccgtgtcctcacatggtagaaggtactaactagctctatgggttgtcttttagaagggcactaatctcattcctaagggctacaccctcctgacctaatcacctcccaaagacctacctcttaataccatcactttagcggttatgatttccacatgaattttgagaggcacaaacattcggaccatagcagtatgattccagctgtataacactctagaaaggcaaaactatgaagacagtaaaaagatcagctgttgccaaaagcagtgtgtagaaggaataaataggtaggggacagaggacagtatttttactgccctaaaaatcctctgtatagtatcataatgatggataaatataattatacatttgttcagacccacagaatgtacactaccaggaatgaacccaaatgtacactatgaacttgggggactgcgtgtgaatgcaggctcatcaattataataactgtaccactctggtgggtgatgccgataatggaggtggctatgcgtgtgtcagggtagggggtatatggaaacgtctgtaccttcctctcaattttcctgtgaacctaaaaactattcttaaaaaagtctttaaaaaaaagcaatctgcagttctatataagctatatgcacatgaatatatatatatatatatatatatatatatatatatatacacacacacacacacatatattaagaaattaaaaaatgaaaatctacatatgcagttgaaatcttatggacacacatatacatacacatattgattctgaaaggataagcacctgtttgtttattcttatgaactaaggcatgggaccaaaagggaatgagaacggtttttactttttacttttctagtgtctgaattatttataatgaggttttattttgtaattagaaaaagcaaaatatttaaaggactgtaacagaaggtaccatgtgaatgaaagacaaagtgagataaaatcgagggaagtttaaaaaaaaaaaaaagaggttaaaaactggccaaatttaaaagagaattcatcacgtgtaaagatgagaaggaaaggagagaattctaaataacggtaaacaaaacaaacacagccaagagtttgagaccagcccagataaatggtgaaaccttgtctcttaaaaaaaaataaataaaacaaattagctgggcatggtggcacatgcctgtagtcctagctactcaggaggctgaggtgggaggattacttgagcctaggaatctgaggctgcagtgagccacagagaccccatctctaaaacaaacaacaaaactacacacacagaggcaaacagaagaaagcatgtaagaaagcacagatagtatgtgcagagattacatgtagtctagttttactgcaggacctagagagattgagagagaggtagatgatgccaagaaagatggaactgagaacctattccaattgtccagaagataacagcctgaagtaaaatccttccttctaaattgcatgtgccatttagaattatctaaaggaagagagagaaaaaaagcaaagcctgccttgtcttccaggctgaaggagcccagggaattctaccacaaaatatggctccctggtataagtattttgaattaaagccccatcagagatcaacagatgctagaagagactttttccctatctacaaaaagaccagacagattccccaaggggaacaattgttttcccttctcctcctcagggagaagggaaaacaattttattatttgctgcagaaaagaagactgaagaatgtaaccacacccaaaggacactttcacaagataaagtctgtctcttaggctcattcagttttcaaagagaatacaagttcgtctctgtccttccaactctccgtccattccttctccctagtaatcagttattgccgctcgagagaattacctccattcaccatctttccttcccctctgaaaatagctatataagtatgtgggccccactgggatatttaagtaatcattgtgattctcacctgtgcacattaataaatttgtatgccatttctcttactaatctgtttctgtcagctgattttcagcaaaccggcagaggtggaaggggaaattttccctcgatccctacaaggctcttctgaactccttgggacttacagtcaataagataagccaagttaacataaaagctctgcagccccaatgacacaaaaacacttaatataaaatacttgtggataaaaagccatgctctgttttcacttatatgtaggagctaaaaaaaattggatctcatggagatagagagtagaacgatagataccagaggctaggaacagtgtgtgagggagagttgggggctggaaaggaggggataagagaggttggttaatgggtacgaacatacagttagaagtaatgagttatagtatttgaatagtacagtagggggactatagttaacaatgacatattgtgttatttcaaaatagctagaagatttgaaatattcccaagaaaaaataaatgttcaaggtgatgcatattctaaataccgatttgatcattacacattgtatgcatgtatcaaaatatcacatctaccctataaatatatacaaatattatatatcatttaaaaaaaaattcatgctcaacttgaagaatactgagactgtaaaatgaaaccagaaaaataactgtgtgaggtaatgcatatgttagatttagttagtccacaatgaaaataatacttaaaaacatcatgttgcacaccataaatacatacacctttatctggcaatttaaaaaataaaaaataattttataaaataataaagccatgctcaaagtcaacagtaaaaaatctccaggtttaagaggacccacaggcctggaacagcagtcatactatcctcaaggtgcagataccctatgggcaatgggatcctacaccaagcaaccactatggaaaatgaactcactgaagttacaaaacatgcaaagaaatgcaccatcacctgcagagaggatcagcaaatatagccagaaaaaaaaatgtgtaactaagatttagaaatagaaaaaaattaagtaggtctaaaatgttcaaagatgaaacagaaggaaaataaagagtcgaaaagagaactgtaccaagaataaacaaggacagcaaaatcttagaaatgaaaactccagctatgtgctagctacaaacacacctataatgaaaggctgaaaatacaggactgggaaaaatgttataccagacctaaactacccatcagaaggtaaaaagcctttgaaggtaaacataagggaaaggcattaattatggataaaaaggagacattacaaaataaaggaatgatccacttacttattaaacttcaggtaatcatgtagaccttggaggagaagacaatctattgagaaataaaacaaataataaacgtaatgtataaagtcagcctgagaagtgccatgaattaaaataaagcgggaggaggggaagaaggccacagagtgctattttatggtgtgatcagaactgagttgacattttagtggaaacctgaatgaagggaggaagaaaattattaagaaaatctgggaaaaaagcattctagtcagagagaaaaaacaacccacaatttggagacaaacagcaagaactacaaggtggttaaaggcaagtaaggggaaaaaatagaatgataaagatgaaccaaaccaaaaataaaattctgcagctctcctaaacatctgaacagacccctcctcttggccaagggcattccagagttaacctgaaaatctagttcaggccacgatggaaggggggttggatgtgcctcattatacccctccagcattcacatcaacacagatcttaagtctgataagaaacatttacaggccgggcgtggtggctcacgcctgtactcccagcactttgggaggccgaggtgggtggatgacgaagtcaggagttcaagaccagcctggccaatatggtgaaaccccgtctctactaaaaatacaaaaattagccgggcgtggtggtacgtgactatagtcccagctattcgggaggctgaggcagaagaatcacttgaacccgggaggcggagattgcagtgagccaagatcctgccactgaactgcagcctgggtgacagagcgagactccctctcaaaaaaaaaaacaaaaaaagaaaaaaaaaaaacatttacaatctattcactctgcagcctgctacctggagccttcatctgcatcataaaaccttggtttccacacctccttatggtaacccaaacatttcttctactgatagtaactctttcaaccaaccgccaattagaaaatttttgtatgacctggaggccccgtcccctttgagttgtcctgcccttccaaatcaaaccaatgtgactgattgatgcattatgtctcactaaaatgtatagaggcaagtggcatctgaccaccttgggcacatgtcagcaggacctcctgaggctgtgtcacgggtgcgtccttaaactcgacaaaattttctagattgagacctgtctcagatattttggggtcacagaccccaaaattcaggcaggaaatggagactaggctatggtaagaattttgcattgtttctttccaatatgacgaatttatgaaaccacctatcaacttggcattaaaatacagtacaaaaggccaaaataagggaactattacaagattagacaatttcataatcatgagagatttaatacacctttctcagaaactacaactatcaagcaaaaattacaaaacaaagatgaccaacaaaatcaataagtttaattgcccccaaatcacaacactagtaaatgcaaggtaagtgttttgagagtacattcagccagaagttagatggcaaaaacacaggaagaagaatgtaaagtgagatgctatcatcaactgaaaaaagagcaaggaagaatagaggtagtataaatacaatggaggtacgaataaaacaaaacggagaggctgggaccaaacacttagagaagggaatggagttttaactagaggaattaagggaattgttagatggagacccagctaaggatggaaagaatgaatttacagagtatgtcacttaattattaatataacagtcaaaagggtgacaacagtctgaaggtaacagtactgaggagagcaaagatcacctggtggccatcgagcagaccatccagagggaaagctccttatctgaggaattcagaaacaattagacttctctattagctaaagccggcatctggtaccaggattctttcccagaaatttataagtaactagaatctctatacatgtccagaatgtatgcatgtcgaaactcactgtgcaacttttgctgatatcaaagcaccaaaatgtctataaatgtaatcactgatcatgacctacgtggctaatatggtccaagttacccttcagcttctgctttaaggtccataaatacccctaagaaaaaatccactgcggtgagctgtcctctcttgctgaggcgcctggctgcactcttctgcagcactctttctatccaataaaactttccttttcaaacctacggtgttgtcggtaaatttttcttactaccctactaccccaagctgaccactttctgatgctggggctctgacacctcacccagcaagtactagtgtggggaagagggccactctgaacactttgaaagtaagggaaaaaagagaaaacaacaaaacacaggacttgacagccaagaatggggtaaagagagggaagtgttaagagagctctaaggttttaaatctgaaaaatacggagagtgccatttgcgaatatgagaaaactgtgaaggggacaatttaataggagagaaaaacacattttcttttggattcacaggatgaagtaacagtgggacattcaaatggaaatgtacacagactgtggatttacttgtggaattaccagcatagtggcagcagaaaccacaacattagacgtatttaccagatgatagtttacagtaataatacatgactattttgggatcaggcaacctgagtaaagcttttcttccttgaaaaatgtgtatttgcaatacaaactatattttccataatatttcaggatattcacatgcccactgaagtatatttgggtttcaaacacgaaactctggtttagggagagcgacaggggtagagccttgagtgccacccagagctaggaagaggaagaaaagactctaaaggaaacaaaacaggagaaaagccaccctgaaaaaatcaggacactgaaaaccaagacaggaccaaattttttcaagtaatggataatgaacagaataaaatacttgagtactgcagagaaagataagaactaagaaatgactggccaggtgcggtggctcaggcctgaaatcccagcactttgggaggccgaggcgggcggatcacctgaggccaggagtttgagagcagcctggccaacatggggaaacccgtctctacttaaaaaaattagccgggtgtggttgcgcacgcctgtaaatcccagctactcgggaggctgaagcaagagaatcgtttgaaccttgcagtgagtcgagatcgcaccaaggcactccagcctgggcgacagagagagactcccaacaacaacaaaaaatggcaggacaggaaggtgtctatggctcagcattctaactctgacctttttacaaatatatattccatgagtgaagcaatatgcagcttcagcacaacccctctaactggggtaaaaaaaaacaactcaaagtacaggctgttcttgtaacaactttgcatgtgaaacaagtgaatagctaaactagtgaaactggccctttcattcaacatcactcattaaaagggcgtttacaagattttaatttagtcctgatatagaaataaaaaaagagatcaacattaagaaaaagttgattataattacgaaataaaaacatgttcttatattgaaaggacaactaatttgcataagcaatttaacaaaatagctaaaatgggcttgatacaactgcctcacaaggcataagctcttaatgtttcactgtttaacagcattttcttaatacactgaaacatttgtcatttttgaactctcagaaattaggactgcagaaccaggatacaactgttttggaattgaaaacagtattttaagcaggattatatgatagtcccttatgtcacaactctcctgagtttttcctatgagtcaccattttaaagttatcattgtattaggcgtggaaagcaggttccttccagcacaatgatagaaatgacacagggataggaagcactgcaacacagtgattcatacaccttatccacttaagcaacagcggtcaaggatagaatcaaatgtggatggggtcagaaagagattactgacaaaaaatatcaggcagtagaatcaccaggtgcacactgacagtcgagaatgatgtagactagggaaaccctcctgagagtgaccagttaactactggagaacactacagtccaggggaaggcagacagactctggaaaattgaggagggagtcgtggggatgggacagggggagcagggcgggacctgcgaaaccaaatacggtttgcgcttctggggcagcaaagcccacgggggcggagggcgccgagtaccaatgagctccaggacctgcgggctccttccagcgccagctcctccccaaagcctggcgtgtccccaccctctcgctcgggaagtgccctccaaagaaagaaaggacgacccggagcgccggacaagggtccagaacgatcaaccagcctcctatcgtcccgcccctgtcccctcgcggctacttaccgggatgcaggccgcagtcactagggctgcagcggcgactcgctcgttcccggcaatgacgtccactccaaccggcctgcatcagctgagcttccaacacaaacactggcgcagcagctaggtcgccacccactcagccccgccccgctccgcccccagcggaagtgacgcgctagaagtttgggtctacccgcgggccggggtgaggattttccgcctcgctcaggcctctgcctccttgtcaatctccgttcctcccccgccccgagatatgcgcaatagagcatgacggagcgcaaggcgggaagccgcgacagacgtgtgtgcgtgcgtgcgtgcgtgcgtgatgcgcgaggcgtggcttgctggtggggcgtgctgtgccttggttggttgccgggtgtgagagcggtgggacttcgttttgccttcctgggcgggacctcggagcagtgtcctggtttgcttgtttgcgggccgctattccctttcagcagagataagcctccctctccgcgtccctgaagcccctgcctgcgctgagttccttggagctgggggctgcgataccagtctcttggagggtggtgcccggcgcggccgcgcccctttctctatatccattcctgggcatggccacccagactaaatgtcactcaaaagcgagttgacatatattactgtattggaagttagcataaaccgccccacaaatggtcccacacgtaacacatctttttaaaattgtggcatttcatacgtaccacaggggcaaactacagccctcagggcaaatccagcccaccgcaggttctgctgtactaggagctaaaaatgggtttcacatttttcaaaggttaaaaaaaaagttttgcgacagatgacaattatatgacattcatatttgtgtctgctttttaaagtttcattagaacatagctttgcattcctatacatgctgttaattaaagcttttatactacaatagcgaatttgggtagttgcaatagccccttaccctcttgaagtgaccttgcaattacgttgaggtcgggaaaacagatcagtttcaactagttatcaacctcaaaatgttatcaagacttatactgtactctcaaggcttacccactacccatgggtatgtatgctttagccccctgtaaggttattgtaaagtccttaaggaaggggattctttgacctgtcaaatgtagtggatgttaccctgatagttgtgttgttttgatttttttaaatcaaggagggaaagccagcttgctatgttcttgggacacagtgtctggattatgtacatcataatgcctggtaaaccccagcagtggataagccagacatgttatttagctacaggagagttaaaagatgtatgcaccaattaagccttacaggcgtgtggaaggagctttagtttttgagacagattcctccttgttgctaaagaaaaattattctgacacttgttaaaatgtcaaggaagacatttagaactattgcaataggtgccatgactatcaccatgggggagagagattggcctcaagttttaatacaacaaaaacagctaggatttataaccagcaagcagactgaggggtcagttcatggaaaattactaagaagtgatatcaagggtcggggatattcttgttaaagtgacttacaagattcttgctgaagacaggcggagatgatcaattatcaaggctaggagatactctctaaactgactttgcaagattcttgctaaaactggactcagcaggcctaagacaggggcccaaggatgaggcctagttgggaagagggctcagaggagcctaactaaagtatggtcaaggagagagcaccaccattccctctccgcttatgctctttcatcccctaatttagtcagatgttattaaatatccagattttcctcccatgtcagaaattttcaaataacgcccaattcctgcttctccattcttatccttcctctccctcccttgtctaccaccatacctttaatcagtcatgaagtctgatgagttttaccgcagaatttcttgaatcgttcctctgctccacattcgcatttccactgctctagttcaggctttcatccttgctcttcagtttcatctaaactggttttccagcctgtaactaacctctgacccagtcagtctcttctgtgcaaccacggtaatcttttgaaagtgcaagtccaatcgtgttttcccgaattaaaaagcttttgctggctgtacatcttcacagaatataccgaatgaaattataggttctgaccctgctgaccttccagcctttactttcaccacttgcctctcactctctatcctccagccacacctgtacttccccagatactcttgttccttttcatacttagtgccttggtcatgctgttggcttagctccccttccaccttgtcctcctaaagatttgtttgtccttcagccaggaaaatcttacctcactactcatagaatgaatcattccttccacctgtgctcacttctcttattgcccttgctgcacagtattataatttatttgtttatatgcctgccagtttcctgcagtcaaggagcgtaaggtaaactgtattgtctggatctagcgtaacatccaacaaatagtagactctctaaaattctgtattattgaattgatttttagtttcatttagattactagtttgataagttaaaaatggaaaataaaacccatttatgattcttttgatgttgggcagttttgagacaaaagagaattatatttaatttcaaacaaattcagtagtatgcaaaattggagattatcttgtgtataatagcagactaatgccttcaggaaatcatctatacttgaaataatgctaaatacagtaattgttcaacgctatattctttggaagctgggtaaaagagacatcacattgccctgtatcagttacttgctatgctcattctatttataaggtttattattgatttatctattttagctcttctacatccatagtcactcctttctggtctggttcatagctttttaaaagagctgctaatatctttattgttcaaataaaacttaacattataaccaaaataaattaagccatattggtgcaagatatctctccagatcacctaagggagggatatgccagaaaataattctagaagaataatcaccatggtaggctgaagaatggccttctaaaaaatgcccatgcccaaatccttagaacctgtgaatatgctactttacatggcaaaggggactttttgcagatgtaattaagggtacagattttaagaaaggaaaataatcctggattatctctgtgggcccaatctaatcacataaatccttaaaatcagtacagatgtggcaaagcgaaagtcagagagatcaagataatgagaggaacaatttgacaaggaatgcaggttgccatagggaaccaagagcggctcctgactgacagccagcaaggaaatggagacctcagccacacagccgcaaggagttgaattctgtcaacaacctaaataaaactgaaagcacactcttccccagaggtaccagacaaaagctcaggtaagctgacaccttgatttcacccttatgagacctggaacagaggaaccagtcaactcttgctggacttctgacctacagaactgtgacataataaacttgagttgttttaagccactaaatttgaagtgttttgtttcagcagcaataggaaattaatataattatctttatatagtttgaaaacatgaaagcaaggattttctgttttgatccttagcaccaaggcacagcaattattaataaagtgtggcccggagcgttggctcatgcctgtaatcccagcactgtgggaggcagaggcgggtggatcacctgaggtcaggcgttggagaccagtctggccaacatggtgaaaccccatctctgctaaaaatacaaaaattagctgggcgtggtggcgggcacctataatcccagctactcaggaggctgaggcaggagaatggtttgaacccgggaggaggaggttgcagtgagccgagatcgcgccaatgcactccagcctgggtaacagggtgaggctccgtttgaaaaagaaaaaaaaaaaagttaattgttcagtaactatttggtgagtgcatattgaaagaattgaatttattcattcagccattatctactgagtgcttactatgtgcctggcaccaagctatttgctggaggtaaaaaattgaagcactgtcacggaactcaaaatataaccttaggtaataatactattaatgtagaaagagcactaatggagacatgaactggatattatgagtctagagcaggaatacctaccccagcctgtggtgttgggaaggaacttctgaaccaagtcttaaaagatgttgctagcaagacagatggcagtagtggagtggtaaaagtgggaagagaaaggagagagctttacagagagaagtgatgtttgtaataaaaggcaataaggcaggaaaaaacatagtgcatgaagggaactatgtgttccatgtttgtactggaaatgtaatataaggattgggtgagagctgaagaacttggacctgatcttctgggtgatcagaaccactgtcagattctaagacaaaagaataacatggtggaatttaagttttaagtacatttttttggtaccatgagagggcaagatttgaagaagatgaggagtcctgttgttgtcatatttactgttttcctatttaaccttttaataaaaaaatcattctttctccaccttaaaaactgccttaaagaatttgcctatttatacctgcagttcaggcctctctatcaggcttgagaccagtttatccagcttcctgctgggacatcttagaggaactaaaccagtgggaaataaaccagttatatataaggtgattttctgggtgaagaaagaatagttttattaatagacaggttatagctaaggttttggcacaagagtagcaacataaaattaagatattaaggacacataattgtattttctccaacttacttttgaatctgagttagattttaccttttacctaatacttttgtaggttattccatgccttgcttatttctatgacaactcatccagttgaaaagttggaataagtctaaaaatgcccccatattcaattgcatgttaatttcttttctttctttcttttactttttttttttttttgagtcagagtctcactctgccgcccaggctggagtgcagtggcgcgatctcggctcactgcaacctccacctcccaggttcaagcaattctcctgcctcagcctcccaagtagctgggattacaggtgcttgccaccacgcccagctaatttttgtatttttagtagagacggggtttcaccatgttggccaggctggtcttgaactcctgacctcaggtgatctgcccgcctctgcctcccaaagtgctaggattacaggtgtgggctaccacacccggcctcttttacttttttatttgagatggagtttcgctctgttgcccaggctgaagtgctgtggtgtgatcttggctcactgcaacctctgcctcccaggttcaagtgattctcctgcctcagcctcccaagtagctggggttacaggcatgtgccaccactcccgactaatttttatatttttagtagagacagggtttcaccacgttggccagggtggtcttgacctcctgaccttgtgatccgcctgcctcagcctcccaaagtgctgggattacaggcatgagccactgtgccctggcgcatgttagtttcttataggcaagtatcaatgtttgcattgcttaacttcagacttaaggcaaggttggagtcctgtcctccctcaccatttactggttgtgatactgtgggcaaataattcccacaagcctcccttttttcattagtaaaattttcagtatcccaattcagtaatgtaagtgcattatgatctatggtcagagaatgaggtactgtgatcaaacagcatggtcagactactccaaacccctcaacagggtcctagtgtgaaaacagcatctctcatagaaccacagaatttgttttggggaaaagttgttcacggaaggagagaaatacagggcagaaaaacaaaaaggccaggcaacacagcaagcagataaacactggttggaatgtatgaatgaaccagtgcctaaatgcgatggagcaagtagcacttttcctttaatgccaatctatagtttcaaagaacttagaggtttgttggggaccaacaatgtttggaaaggacagtgccagggatgaacatgtgctttactgtaggcaatacttagattccagttctaagctttgccacttatttgaacaaattacccaacttttaagtctcagttccaaaagctgaaaaagatatcatttatgaggaccttttcaaggacatttggactcagtttgagacagaatgtctattttttaaaaggcagcaatacttgcttatattgtatcataaaatcattcaagtatagacgttacagcctatgaatcagagttattattttatcactcccaaaacaatagtgagcaagattcataacctctctgactcttacttttctcatccaataaatgggcacactaatactcataaggtttgtggaggattaaatgaaataatacatgtaaaatgcctagtatttataaaacatatttcttgtacacatttaatgacctgattattgtgttagtctttgaatatgccctagtcaataaaacagatagtcctagccctcgtgacctacacaattttgtagaatgcacacagaggataaacagtaaatttggctaatattattggcataccaatactaaatggggctgaaaagaagttgacagtgtttccagttatattatttgaagtaagaggctagcttgagtcaatgtagtaggatgctaaattcaattcaaaagaaatggcatttgtgagcaccaactatatgcaaaacagtgagctagatatagttcctgcccttgaaggtttggtagtcttatagaagagtcagatgtctacagtcaccatgaaacaaggaaaaatgaaatgtgttatgtaacagaagaaccaacaaagtactgtgagaattcagaggaagcagttattgattccaaaagggggttagagatggagttgtcagctttagcaaagtaaacattgcatggaacatattcatactaaaaatattatttgttgtttatctgaaacttaaatttaactgaaatacacatcgtgtatttcatctggccaccctaattagggagagctgttggctgctgaaaaaggtacattttatactattttctgtatttaaagcaactgcttctccaactaacaaaagaaaagagtagtaggactatatatttgagtgtatagtctctattgactacataggtcattatatttacagagttttaaaatttccaccaaactttttggcttcactttatgccaagtagaaaattgagatgtatatattccatataacatattttaaatctaaatagttcaagatactttgtttttaattttgtaatttttgtgggaacatagtaggtgtatatatttatggggtacatgagatgttttgatacaggcacgcaatgtgaaataagcacatcatggagaatggcgtatatgccccctcaagcatttatcttttgagttacaaacaatccagctacactctttaagttattgtaaaatgtaaaattaagttattatgactatagttactctattttgccatcaaatagtaagtcttattcattctttctatttttctttgtaccaattatccatccccaccttcccccaaccccctgtcccccactacccttcccagcctctcgtaaccaaaactctaagatactttcactagataatttatttagctttataatacttatacaaatatcttacatttctttttaagcatcctaattaaatagtatttattgctggtatgttaatatggtaaagattgaaccactctcaagggccattcaattagactttagaacaaattggtatagttctaatgtttgattaaaaaataaaattttggggatattgggacgtggtataaactcaactaattctcactaattccaaaacaactccttgtactggttacccctatacagctcttccagctagtattaatgtgatgcatgcgattggcaagttcctgtggttgcttgacataggctttaaatatgtatattcagaaagtagttttacagtttaccaggtatgatcaatcttttgggaaatgaattcactctaatcagactcataagagattttaattagccagaatgtcaacatctttgcttacattgagagatgggtggttttttattaatatttgctatcgaggacatttttttaattttttgcttaaaaaaaatcaaaatacctgggaaagaggctggcacagaaaagtggttgggagagagtgttcacagaaaacttagaaatagttgtggtagacattttcacaagaagtctctcaaagtttttctttgtttttaggtctgtgttggcaacatttgatgattttttttcactcttgcagatcaaggataactgtggtttagatttccctatttacagcccggtgtggtggttcacacctgtaatcccagcactttggggaggccaagatgggcggataatgaggtcaggagatcgagaacatcctggctaacacggtgaaaccctgtctctactaaaaatacaaaaaattagccaggcatggtggtacgcgcctgtaatctcagctactggggaggctgaggcaggagaattgcttgaacccgggaggcggaggttgcagtgagccgagatcacgtcactgcactccagcctgggtgatagagtgagtctccgtctcaaaaagaaaaaaaaaagatttccctatttacatagttgattttgctaactattatgtttctaaaaccgtgtattcctggggtgtttggatttaccttgaaacgttggactcaatacgtggttgcttgcttagcttgttattggtcacaatttttttaaatgaaatattctgttgtagtccatttttcacacttctataaagaactacctgagactgggtaatttatgaagaaaagaggtttaattgactcacagttccgcaggctttacaggaagcatgacagggaggcctcgggaaacttacaatcatgacaaaaatgggaagcaagcctgtcttaccatggcggaacaggagaaagaggaagagaggaagtgccacacatttttaaaccatcaaatctcatgagaactcaatcactatcataagaacagcatgaaggaaatctgctcccatgatccaatcacctcctaccaggcctctcccacgtgtcaaggattacaatttgagatgagattgtaactgacttttccatatttgtctctttccctctcattctttctctcaatctcgcctgccccaactcttggataagtgtttagaaatgtcaatctccttttttaaaactttatccatttttgcctttttactcactatatcttcatcttctttaacatgttttcctaacagataataatccctaaactataatttacaggttaatttcacatttttcttgattctttcctaaggacatacagagatgctatgctctttattttcaccagtgaggtatttataaacttataaatcatgtggtaggaagttacttctcgaaaaccttccttttgataactaatcttctgtatgatatatgggttttgttgacttcagtcttaggaagtgacacttctgaactttttctttagagtaggaagtttatcttaattgggggactctaactttctacttgtaaaatgcacacataattgtaaccaaggaataaaagaaaaaactagaattttaacaggatgtgtgttatatttcccaacattatggaacttaaagttttcctaaacttcattttgaggatgagaataacattaatagaatagtcatagcatttaggaaagactaaaataattaagatctggtgactatatttacttcattttgaatttcacaattgaatttcactctgttgcatgatttgctttttactaatattaaaatataactattatgacatagtaacttttaaaatctcatctggttctcagttgcctattaatgatatttagaaccatattatcatttagacttagcagtgatcctaaaaatcatctattctaaatctgttacttacagatgagttcaatatttcagtgatacccaatgagattaaatgacttacccatttgcacatacctagtgaattcaaccaaggtaggagaatacatgtattttaattcttaattttcctttttctccactgaactttgatgcttctagaatataggtactattatgaattatttttgtaccaaaattgagctttttgttttaagccaacttttaaaatattttgcagttttatgaaacaagaaccaatattagctgtgagaagtgacaaagtattgttgaatttcttactaagtttttggacttctaacaaacttaattaaaaatatagattataaaagaaaataacaaatactttaacaaaataacaaaattaagtcaacttaatagaggcaccaagcagcagaagcagtatttttaaaatacagaattaaaatgacgtggcagttagtgtttgtcagatgcaaagaattactgttagccttctaaaaatatggatttccagaccttgctcctgggagttctaattcagaatgtctagggtggtgctgtcaacactatatgaccgaacaagggatttataactttttggtttacagactcttttggcaatctggcaaagtcagtggaacctttcttggaatatcttagcttggactgagtgtccactgttgggggttcaggtaggtttgacgaaggagaatgtcaagtccctcagaagagtacacgtttgagggctgagtagccctgagcaggaattcactctgtggccagagtgtgtccagtgagctggtgaaattggtaaactgagagaatttgatttgcaactgggctgaggtgcttcttgggagacaaggcaattcaagtgaagaaagagccaagcactctgagtttgatgctgtaacaaagctgaacaaagcctggggtgcgggatagctctctgtatatagactgatagttatagtgaagtgtttctccagttcatgcctcgagaacaaagactgtcaataaaaagtgtaagaactcttctgttaaaccttgtaacttgttaggagcacaagtggcattgccacatgtgacatataaagctggggcccattctgtatgaggacccacagtccaccacttggccaccagccatgcacaaaccatgagagtagaagagatgtcttatggcaattcaggcttaaagtggttagggaagaggttagcagcagtatagaaatccttcatcagcagatggagtcatgaattttagtctgttttgtccactgctgaatattttgtgtttataattgtgccattcacttactaggtactcactgattatttgttaaataaataatgaaaaaacaaactaatgaaagaagcaatgactttatagccgcaggttggttagtgttagagaaatttaggttacaacagaccttgtatgataatactaagtcactgcttctaaaacccagatccaggaaaatgtcaaaactgaaaattttaaaaggaatttcaacagaaaatccagattaagggtggatctgctttccccagcccactgactcaaatgttaatctcctttggcaacaccctcacagacacacccaggatcaatactttgcatccttcaatccaatcaacttgatgctcggtattactgggagcacaagtcatttagtattggtaatcacatcacagcatttattactggtgaaagaattgttctatattctgggtttgcagcagtaagacaaccaggaaaaaaaaaatctgttctcttaaagagagaaattaattccaaaatttcaaaaaaaaaaaaaaaaaaaaggtatgtaatgccagaaagtaagaaatggtatgaagctcaaatgcccgtggtctccactcctgccaccctgccttctgtcccccagcctgcactgatggcctcatggggagttccctataatcagctgacagaggaagagaagactagggcctggttcacagatggttctgtgtgataatgcaggcaccacccgaaagttgacagctgcagcactatagcctctttctaggacatcccttaaggacagtggtgaagggaaatcttcccactgggcagtggtgaagggaaatcttcccactgggcagaactttgagcagtgcacctggttgtacactttgcatggaaggagaaatggccagatgtgcaattatatctatattacatctaccatctatggactcacggaatgccttatccaccatcatgttattccacacagcattgcctctgaccaaggcactcattttatggctaaagaagtgtggtagtaggctcgtgctcatggaattcactggtcttaccatgttcctcatcatcctgaagcagctggattgatagaacagtggaatgacctgttgaaggtcacaattacaatgccaactaggtgacagtcctttgcagggctggggcaaagttctccagagagccatgtattctctgaatcagcatgcaatatatggtattgtttctcccatagccaggattcacgggtccaggaatcaagggctggaagtggaagtagcaccactcaccatcacccctagtgatccactagcaaaagttttgctccctgttactgtgacattacgttccgctggcctagaggtcttagttccagagggaggaacgctgccacctggagacacaatgattccattaaactggaagttatgattgccacctggacacttgggctcctcctacctttaagtcaacaggctaagaagggagttacagtgttggctggggtgattgacccggactatcaagatgaaatctgtcgactactccacaagggaggtaaggaagagtacacatagaatataggagatccattagggcatctcttaatattaccatgccctgtgattaaggtcaatgggaaactacaacagcccaatccaggcaggactacaaatagcccagacccttcaggaatgaaggtttgggtcactccaccaggaaaaaaaccatgacctgctgaggtgcttgctgaaagcaaagggaatacagaatggtggtagaagaaggtagttgtcaataccagctacgaccacgtgaccagctgcagaaacgaggactgcaattgtcatgaatatttccttcttttgttaaaaacacgtttatgcatgtatacacttgtactaagaaaacatcttcattttatttcctttctcctttatcatgggacataagatttattgacttcacatcagcatttaagtatgttaactttatgtaatagtatttgggttggggattgatgcgtttctggttgtacaaagaatagtcgtattatgttaggagtaattatgaccttattattgtctttacttaaagattatgtatgatctcaggagatttgtatgggttcaagttgacaaggggtggacttttgatggttaatactgagtgtcaacttgattggattggtagatgtaaagtattgatcctgggtgtgtctgtgagggtgttgccaaagcccacccttaatctggtgcataccatctaatcagctgccaaagcaactagaacataaagcaggcagaaaaacatgaaaagactagacttgcctagcctcccagcctacatctttctcctgtgctgggtgcttcctgccctggaacatcagactcccaagttcttcagttttgggacttggactggctttccttgctcctcagcttgcagatggcctattgtggaaccttgtgatcatgtgagttaatacttaataaactctcctttatatatatatatatatatatatatatatatatatatatagatggatgcatgtatagatatatatgtgtgtatatatataatatatgtagctatcctattagttctgtccctctagagaaccctgactaatacaaatgcccattacgtatttgttgataagagaattaattaatcctccaaggtatgggtgggagaaataggttccacaatgcatatgaatagtccacaacgtggcttttgatctatacatctattaaaaaaacccagtttttattttattataacttttattgcatcacaatgcaagtataagccataaatcaatttagtctgctcagtgaatatctctatattttactagtctcaagtgataagatagcttttctactcatttactgaccatgattgccaaatacaagacactccactaatgacatagatttttgtgtattctgagaaatgaactctaacatggtcatgaacttatttagccattaaagttttttttttattttcttgtttttttatttttttgagacagagtttctctcttgttgcctaggctggagtgcaatggcgtgatctcagctcactgcaacctccacctcccaggttcaagcaattttcctgcctcagcctcctgagtagctgggattagaggcacctgccaccatgcccaactaattttttgtatttttagtagagatggggtttcaccatgttggccaggctggttttgaactcctgacctcaggcgatccacctgccttggcctcccatagtgctgggattacaggcatgagccaccatgcccagcaccattgagttttaatatatatacaatttagtatttacaagccattttatttataagtgtgcactctagttaatgacttttgttaaggcatttgaaaaatacgttgaaaattgttctttggagctaaaaataaggctggaagtttaagttgttcaagtcaatttccagttactctgctctttattttctctagtaatctgagcaatttggcaacaccactttagagctaacatgaaaagacctagctttatagaagcatggcatccatttgagcctagtaataatttttaatatgccccaaggagatgaatgtttaatggcaaccatttctatttaaaaaaaaaaaaaaagaatgatcattccttgagcagaaaaggaatctatgagtttagatattgactgtattttctgttgctatacaattattctgcattaaagaattaaaaggaagattaaaaactcacaatagacacattcaattacttcacgtataatttccaattaaataagttctaactaaaccaaattagttgttaggcttttaccaaaagtaatttatgatccaggtggtttaaaaagcgctagagacttgattaaatttagcattcttatgtatatgctcacttttgttgttttgctaatgattctctgcaaaaacagttgcaaagctcaaagtaacttttaagttgtatggggctctgtaggcatccagtgaaaaggtctttaatacagcagtaagacagaattcctcaagaagcaaatcccctgttgcaggttcattcaatcatataaatgcatttcaaagcatcctgaaattgagccagcccattatgtttaccagctaaaactttacagcttaacccttaagttacaactgtaatatttccttatatgtgaagatgtttttcttttctcttcaagatgacattcaataatctgacagtcctgttcattgcagcaccttgaacacaaaaataagtctgaattggctgaagatcaggaaaaaaaacccttaaattcaaacaaatgttttggcaagaactttcatagtttgtcgaatttgtattgctattctgtcactgtggaggggataacagaattgcttaggatctatatctatatctatatctagatttagatatagatatatattatgtagcatggtggacttgagtggcatttttccaggttctttcccaactaatttgtaatatcacaaatgtctataaggctagatggtaaagatgtttgcctccatttataaaataatcatggcactcaggttatctttttctgcataacaatcctgaaacttagtagttgaaaaaaacaagcattttattatatttcacaatttccctggtcagatatttaggcatggcttggcatcttctgtttcttttttttgtttgttttgttttgtttttggagacagagttttgctcttggtgcccaggctggagtgcagtggcacgatctcggctcactgtaacctccacctcctgggttcaagcgattctcctgcctcagcctcctgagtagctggaattacaggcatgtgccaccacgcccagctaatttttgttttattggtagagacagggtttcaccacattggccagtctggtctgtaactcctgacctcaagtgatccatctgcctcggcctctcaaagtgctgggattacaggcgtgagccactgtgcctggccaagcatcttctgtttcatatggcattgactgaagtcacttagtggcattcagctggcagatgggctggtctggagaattcaaaatggcttcccttacatatctggtgccttggtgggaatggctagaagactaggctcaaaacttttttttttaaatttaatttattttattttatttttttgagatggagtctcgctttgtcacccaggctggagtgcagtggcacgatctcggctcattggaacctccgtctcccaggttcaagcaattcgcctgcctgagcctcccgagtaggtgggattacaggtgcctgtcaccacgcccggctaatttttttgtatttttagtagagactgagtttcaccgtattagccaggattgtctcgatctcctgacctcatgatccgcccgcctcagcctcccaaagtgctgggattacctgtgtgagccactgtgcccagccagctcaaaacaattgactggaacagtatcacagggcttccagagcatggtgagctcagggttgtctgacttcttatatagcaaattgctttcccaagaatgagtgttgcaagaggcccaggcagaagctgcaaggctttttatgagctaggtttgggagccctagaacatcaagcaagtcactaaggccagtccggattcaagagaagggaagaataggttctgccctctatctcttgatggagtaaggcatgcttagccaggaagaaaagaagttgatggtgatcatctgccatcacgatggtactacaaacatcacaactagggactgatgataagcagtctatcaccaaatgattactttccaagagaaagtcgtctttaaaatgttgcaatttgcagtagctgtgatcttcagttttgcatatctaggtctgaaatatctcccagtattttttattgctatactaaattgttccagccaaggatatccaagacctatgtgatcaggattttcctgggttggccctattttttttatcccagtgatagttttgaccatctggcatgcaaaattttgtgggatatttaggtaaacatacacataggtaaacacaatgtattgcacatcagaagttaacagcaaatcatgccagtttgagctaggaagttatacaagtcaccactgggacctcattttcctatatataatggggggtaggctgggctaaaatataaaaaaaattatgaacgactatatgccaataaatttgacaacttagatgaaatggatagtctttgaaaaatataacttaccaaaactaacacaagatcaaaaagaaattctgaataatcttttttctattaaagtaattgcatttgttttcaaaaacttctccacaaagaaaattctaagcctaagtgattttcctgatgaagtctactaaacatttaaggaagaaaaggagacaattcatggtccaaactgtcaataatcttctaaataaagaaggacattgggccagggacgctggtttacatctgtaatcccagcactttgggaggccgaggcgggtggatcacctcaggtcagtcaggagttcaagatcagcctggccaacatggtgaaaccccatctctactaaaaatacaaaaattagctgggcatggtggcaggcgcctgtaatcccagctactcaggaggccaaggcaagagaattgcttgaacctgggaggcagaggttgcagagagccgagatcgcgccactgcactccagcctgggtgacagagcaagactccatctcaaaaaaaaaacaaaaacaaaaacaaagaaggtcattgatatagaataggtaaacaacaacaacaacatatggggagtaaaaaacgcttatgaaacaaactctccataaattctttagtaattaattaattaattaattaattatgagacagggtctcactctgtcacccaggctggagtagcagaggtgcaatctcagctcactacaacttctgcctcttgggcttaagcaattctcctgcctcagcctcctgaataactggggctacaggggcacatcaccatgcccagctaatttttgtaattttttatagagacggggtttcatcatgttgcccaggctggtcttgaactcctgggctcaagcagtctgctagtcccaaagtgctgggattacaggcatgagccactacgcctggcctagattctctgtaaattccacacttgaaatgcagtaatgcaagtttagaaggaagaggcaatcaaaggaaactagtagagatattttcagaaaaaaaataaattatatttagttttatttttgtcttatttagaaagatatagattgctatagtttgttgaatttgaggctacctttttaaaaatagacacactgccaagaatgacaaaaacagttggattgctccataaaatgaattgatataagatttaaaaagaccagtaaatgaagcatagcattattaatattactatgtagtgttaagaatgtctatactgtttttaaagtgtagtgaaagtgacttttcatgtctaatagattagtatagttcccagaacaattgtaaaccgcaaatttttgttattttgagggagttggcagcaaaacattccacagcattaagatagaatggcagcttctaagtctcaagtgacaatttgctgtcagttccattgtgaaaagcgtgactagttcaaatatttacagacaattttaggaataatatatctgtgaagatagagaataaatttaggtagagcttaagcttcatagaataaaatcctaatcaagagataagtcattcaagatgaagataattgtctagaaaaatatctatttagaaaaatatcaaagtcttgacttaaaaattcaatttagaatttagataattccaacataaggaagatttaggagtggctgatagatcaccttttgtactgttgggttattacatttttgagtttcattgatttatttgttaatcattctatatattgcaattaaaaataggagtcttagagtcaatattttgtgactttctgagtgggacctcaaatagaaaatagtgatatgtgtatttttaaccatcttaaatttcttttctctcatttaagtcttatattttctaaatttcccatctcctttgacattctaatttctatggtttttcctctatttgctcttaaaatggatagagttgagatacacagtagggcaaaagagccagcacagagttagcaacaggttttgagattgagtaatgtaaagttcccattaggttaacgatctacaatatttattaaatagtaaatagatctaagcatttactaaatagtacttattaaatagcatttattaaatagtaaatagatctaagcatgatgcagttcactttatcaaccatctgtcaatcagataaggccacaagagatagcatattattatcatcctgtttttctgtaaaaatttgagggcttgctaggtgccaaaaacaagttttggcctccacctcttaggaacttgcagagcagtcacagagactgatacataaagaggcaattacacagcaaagtgtgatttagttataataatgaatagaatgtgttcagacaggcataaacaaccagttggtgtgtacacctggaacaggtgatatttgaactggttcttcagtgatacataggacccttacccacaccgctgcccctgaaaagttctggtttcagttttgctccagattaacaacaacaacaaaaataggaagaggaatcgtaaggggacgaggaggaagaagagaaggagaaggaggaatttgtgggatcattttatctaagtttggaagcaagttttcccatatcaagaattattgtttaaaaccagggtgctccattctctattcttaatagtgctgtcgcctcacttagtattttgctattgctaaggaatgagcagtttacctttgcatgacttgagctgatgttgttgtctattttttattaaaaagctttgtttacagtactcttcagaaatacattactgtgatgatacctagtaatgtgcttctacctcctcactaaattatattaccaatgcaaaccagatgtttcagtctcgcttgcattggtaataaaataaatcggagctggatcccagctctatgcccctcctatattaaggaacattgttttccctttgtgttttatcatttcccaaattaaggaaactatccaggtggactggaagttgatatgctgaagggtgtttcaaagcaccaagttttaacaaggcaaaacaaatgcttcttgagcatattatttaatgttccaaaaaaggaatagacatttcttatttaatgacattctgggaattgtttgaacaatttgtatagtgtccgtcatctgtcactctctactccctcaaaaattctttctcatcttttaataccacactgatgaacggattaacttatttttcatccgtggttcaggtacattctagtctcatgccagtgaattcattttcatttagactaaccaaggtagcaagctcaatgaaattaacctcatttcacatttataatattctagttcattgtgcatatttaaacaccacacatctttattaatggaaaacatgaaccatgcactgaataaaactaaagattaggttctctctgaaattagctcctactccattgcttctcattttgaattatatttctgtaaccaaaagcaagacttgaacttacatattattttccagcgatccaaaagaatacttacttaatccctaaatttattttctgatattctatatagtaatttgaacattaaaagttattttccctaaaattatgaggcagtattcgtctaagatttgtaagaattctgtgtacagtttatcaagcctgcttttagatatgggacactttttcttttagtcctagttctattcctgattaattaaaatcacatagttgagctgttgtttgtgtattaacctgtctagaataatcgattttccatttctatgtttcagggtttttagatgataaaatacgtaaagagcttttgtttctctaaagaatggcacaaggtaagatgtaagctattattgccctgagcagtggtgtttaaattttgaggggtaatttatccctttcttaatcttaatagaaattgtgaaaaatgcctatgcacatgaaattttgcattaaattttagaggatccaatgagcctcctaaaagcctcccatggtccagtccccaaccctggagggaatgctactgcaccttttctaggtactggttataacatgccaggagagatttaaagtagcattatttacactacaattcaagttaataatttaacaggacctgcctgaataatgggacaataatatactcatggagctgcaaattggttaatttatatgctgactgtctcaatgtggagccagaattagacccagcaaaacagctcttgaaatatggcttagtaggtgctattgttcacctgaaaaatatttatggagctctgactttgtactaggaattgtgctagacaatgaagctaaaaagctcataaaaagcttatactttggggataaaaaaacaagtaaagaagcaataatgacactggatgatagaaatgataataggattaagtaaaaggagctaacagactaaatatgaaggttatctggaagggcaaatgaaggctttctagataaaataacgaataggtcagcccttgtattagtctgttctcatgctgctagtacagacataatccaagactggctaatttataaaggaaagaggtttaattgactcacagttccacatggctggggaggcctcacaatcatgactgaaggcaaatgaggagcaaagtcatgtcttacaaggcagcaggcaagagagcttgtgtaggggaactcccctttataaagccatcagatctcatgagacttattcactatcatgagaacagcgcagaaaagacctcccccatgattcaattacctcccactggtcccacccaggacacatgggaattatgggagctacaatttaagatgagatttgggtggggacacagccaaaccatatcagtcctgaaggatgaataggagtgagcccatagctcttacacatattcttaaaaacccagtgttctacaagccttattgcaaacaaaacaaaacaaaagcctgcagtcctagttcattttctgctctccagagtcaaccgcttctaatcatattgcagattctttgtgtatttacctatatttctcaaaataacatgcttaatacacacacacacacacacacacacacacacacacacacaagtactttttttttttttgagtctcgctttgtcaccaggctggagtgccgtgacaggatctcagctcactacaacttccacctcccgggttcaagtgattttcctgcctcagcctcctgagtagctgggactacaggtgcacaccaccacgcccagctaatttttgtatttttagtagagacggggtttcaccgtattggccagtatggtctcgatctcttgacctcatgatccgcccgcctcggcctcccaaagtgctgggattacaggcgtgagccactgcatctgacctatatttttaaagttttggatttaggcactgtctttttgacactccactatggtagatgaggatttgctctgtttaattaccttgtcattctaccccttgcttctgacccaaccacaaacatgagcatacacacacacccttctatgttaccttctatcttcccaatatacattgtgtaagtggttatattgtatttacattattttgaccatgtaaatgcagttatgtatgaagaaatgacagtttgatcttccatgcacatttcatgtcaatattagtctggattctttgcatagttttctctgtgctttatcattaatttaaccctaaattctaccccagatgagtgagtttcctctccagatattcaacacattagttaatctaatgatttccatctttgaagaactttatgtttcatttgaagaactcgatgtttctgagcctccagacctattgttgtcatttggactggtggctctctagtaacgttgtattggggcccttccttcaccaccagcttggaattccttttgcttctttcttgatttgaatttccttttttcctattttcatctctagatcaattgaataataaactatcatctaggcaatcattccagaagataaacagtttttttattttcttttatggccttatttccctagaatacattttccaacagcttccttagaaagggtccagaggaggcaattttttgagaccttggatatacagaatcaattctatgtttttccttcagaattttcagattattaatctttctttttactttttgcttccagtgtagctaagaagtttggagctactctattcttgaccctttgtgtctttttttcttcttgctgaaggtctgtaaaatcttctgtttatatttatagctctgactttaaaaaataatgtgccttggtaagtacctgtttttgcccattgttctcaggacataatgggtcattccatctggaaatacatgttcaggtccagaaaagttacttgcattatttctgttactattttctttgctccatttttttttctattacaattctctaaaatgcccattatgtggatattgagtctcctggatctattggatttctaggactaatgtaacaaaataggacagcctgtgtggcttaaacaacagaaatttattttcacagttctgagatcaaggtatcagtaagtttggtttctcctaaggtctctctccctgtattacagatggctactttcttctgtgtcctcacatggtctttctaggatgcccttgcatccctcatgtctctttgtatgtccgaattttctcttctaataaggacctaagttggatagcaataaggctcaccctaatggcctcattttaacctaatctctttaaaggccctgtctccaaatacagtcacgtcctgaggtactgggctttacggcttcaacacatgaattttcaggggacacaattcttatttgggtctcttcctttctatcttttggctttttttgttctactttttgggagattccttcaactttaatcttctaactctcctattaacttttcatttataacattttaaattactagagctctttacgtttttataatattccttttctaaaaggtatcatgtttttgttttcagaaatgcaatatagcctttgctcagaaagaacatgaactatagttgggttctttcccctatgttttcttatgactacataatctgttttcgctaagttgctgttttttacttatttatttgggccatgctatggtctgaatgtgtctcccaaaatgcatgtgttggaaacttcatgcccagtgcaacagtgttgggaggtggggctttttggaaggtgcttaggtcatgagagctctgccatcatgaatgaatgaatgtcactatataaggggcttgcaagaatgtgttccctctctttcactcttctgccatatgaggacacaatgttcatcctctctcactcttcttccatataaggatgtggcaagaaggccctcatcaaatgctggcgccttaattttggacttttcagccttcagagaaatgtttttctttgtaaattacccagcgtcaggcattctgttatagcagtagaaaatagactaagacgtccacatctttattattaactgctcttctcaattgtctgttgactatcagtggacagaacatttaaaagctggtgaaaaactctgtacctatggatgagtcttgccctgagtttcactgtacagcaatgattctcaacttttgctgttcattagaatcacctggaaaacattaaaaaatatagatgctcaggctttaaaccagaccaattgaatgagattctctgagagtggagcccaggccaggaaaagtttctaaaacttcccacgtgattttaatgcacagtgagtgttgagaatcactgttgcagagtggcttagctggacccagttggagtcccctacccgatgttaaatatttttgttcttttttcttggggcttgtcaaattctccagagaatacaccttcagtcttatgcctggagggtatacacttggttgctagagatctgggaactgaaactgagtatgtgatagaggctaggtggggtgggggttggagctcaccattcagtatatacactttcacttaacctctgttttcagtataatgcccctgcccagctagagaccctctgttttaacctctttagagaataaacttccaatcttttgccaggtaaggagcgaaacagctaccaaactgtgtagggtgactaccgcttcttaataaactttaaccaatcctctttttttttacatgccttaagcaccccacactccccaattccagaggtatctgttgatttcaattactaaggcttttgggttctgtaataataactgggtttacttgttggctttccttcatgttgacaggaatctctggaccacaaagacagctactactcatacatctactttccagcttccaaaatgttgttgtgtttgcttcctctttcactttgccctcgtgggttttaccttttaaaagtatctcttaggctgggcatggtggctcacgcctgtaatcccaacactttgggagaccaaggggcatggatcacctgaggtcaggagttcgagaccagcctggccaacatggtgaaacgctgtctctactaaaaatacaaaaattagccaggtgttgtgatgcacacctgtaatcccagctactcgggaggctgaggcaggagaattgcttgaacccgggaggcagaggttgcagtgagccgaggtcacgctattgcactccagcctgggtgagagagcgagactctgtctcaggggaaaaaaaaaaatctctttaccgttgttatagtaggatatgaggtgggagaagagctaaatatatttgttgcatttgctatctcaaatggcaaattacataaactcttcatacataaaatagtactttattatattctagcttgtacatagatttctgtatttcagaagagttggtgaagaatgaaaaactagcagtggcataaaaaatagaactagtagaaataaatgaagaggcattcccatcaggaatggagccactaattttctaaggctctgtttcttaaaatgtggtccaagaatcacacacaatagtattacctgacacttagtaaaatgcagcaacattttttcctaggtctactaaattacaatgtcttcagttgaggccctcgatgctgctctcttaaattttttttttttaatagacagggtctcgctatgttgcccaggctggtctcaaactcctggcctcaagtgatcctcttgccttggcctcccaaagtgctggcattacaggcactgagccagtgtacctggctgatgctgctcttactaactctgtcctacagctctgtctctagttcttaacttagctgaaggccctccataaaccagcataaccgtaattgcacttctagtgctcccaactatattttgcctaattctgtccaggaacctttatttgtacttactctttggaactccacttctccttccatggatttgaaattttgaacctttgtttcctgtgattgaattgtgactgaattgtaagaacttcagtttccttttgcccataccaaaaacataggtcccagttcctgaaaactcagtcaagaataaaatccaggggtgctgctctcagacatagggtaatttgacagaggtaagctcctgctcgtagtagtggcagagaaccttgctgaggattgccagaagcttctgccctaaaaacaagagggcatatttcccaatggcagctccatactcttcctagccctgcagaattcctgttgtccatcaacctctaactgccctttctctggttgccactgagtgaccatgaaatagaaatactcatgtgattgatggcaaagagacttagaatttgcagacttttcaaccatgacatatactatattttgaatgtgtccttcaaagagcatgtattggaaacaatccccaataagggcagaatgaatggattagtgatgttatttcaagagtagattcattataaaagggtgagtttggccccctaactttccctctctttgccattctgccatagaatgaggcagcaagaaagtcctatcagatgccagtgccttcatcttggactttctagcctctagaactgtgaaaacaaaaaacaaaaaacaaaaaactttctattctttataaattacccagtctcaggtattttgttacagcagcataaattggatgaaaacaacatgtgatgtgtatttacagtgatctttatatgcttttctcttaataaaatattgggaagtaatgcatgcaaaaaggatagaaagtcttcattgattagagtagatttttcaagatgagctgcattgagagtgatgtgggtaagataggagacaccaagataaagggtggaagccctgacgtaactgacagattagagagtttaaacttagtgcagactcattttaggcaattccaggtcaacctctagctagagaaattagattaaaaatactgtcaaaaatatcatggaaattaataacactttaatatgttaagttttttacattactagtatccagagaggaaagaaatgactatggtaagcaatttcagtgctatattatatatagatcttcaagtagcctcatttacctgcatcatccatccatccatctagtctatttctctgaagtgtactgtcactttttcatttgtgactcagagaaatcatcttttcctctttattttcatacctaacttccttattcttcactactgtagtctgtttctggtgtatgtcccccttctcaacaccttccttttacgttttagctgtatctatcaaaacaaagagaaatagagagattttaaaaacaataaattgtactgaatattccagatttcaaacatgatcaaaatccattttgtgtttagtttagccataaattttccaggccttatttacacctctaatccacagatagtcattaatcacttaaaaattttcattatagagcctatttgattgttgttatatataatactggcttttgcactgttaaaatatacctacctaggttagagagccaatatgctaattagtgaccattaaaaatggtcaaacccattgattacttacaaacaacattttttttttttttgagacagagttttgcttttgttgccctgggggagtgcaatggtgcaatcttggctcactgaaacctctgcctcctgggttaaagcaatcctcctgcctcagcctcccaagtagctgggcttacaggtgcccgccaccatgcccagttaattttttttgtatttttagtagaggaggggtttcactgtgttggccaggctggtttcaaactcctgacctcaagcgatgcacccacctcagcctcccaaagtgctgggattgcaggcgtgagccattgtgcccggccccaaacaacagatttttaacaccttctttcaaaggaaaaagacagcataaactttaatgttgtattagtctgtgttcatgctgttataaagaactacctgagactgggtaatttctgaataaaagaagtttaattgactcacagttccacagtctgtataggaagcatggttgaggaggcctcaggaagcctacaatgatggtggaaaggtgaaggggaagcaagcacctttttcttttttttttttttttttgagacagaatctcactctgtcacccatgctggagtgcagtggcatgaccttggctcactgcaacctccacctcccaggttcaagcaattcttctgcctcaggctcctgagtagttgggattacaggcgagcaccaccatgcctggctaatttttgtactttttgtagagatggggtttcaccatgttggccaggctggtctcgaactcctgacctcaggtaatgcacctgcctcagcctcccaaagtgctgggattacaggcatgggccactgtgcttggcccaagcaccttcttcagatggcagggcaggagagaaaggaggaagtgctacacactttaaacaaccagatctcgtgaaaactcattcactatcatgagaacagcaagaggaaagtccaccccatgattcaatcacctcccaccaggcccctcctctcacacatggggattacaatttgagattagacttgggtggggacaaagagccaaaccatatcattctgccccttgcccctcccaaatctcatggtcttctcacatttcaagacacaatcatgccttcccaacagttcccctaagtcgtaactcattccagcattaactcaaaagtccaagttcaaagtctcatctgagataagtcaagaaccttctgcctatgagtctgtaaaaatgaatcaaaaacaagtcatttatttccaagctacagtgggggtacaggcattgggtaaatgctcccattccaaaagggataaactggcccaaacaaaagggctacaagctccatgcaagtccaaaaccaagcagggcagtcattaaatgtcaaagctctgaaacaatctcttttgactccatgtctcatatccaaggcatgctgatgcaaggggtgggctcccaaggcctcgggcagctcttcccctgtgactctacagggtaaagcacccacagctgctttcatgggctggagttgagtgcttggagcttttccaggtgcatgggggaagctgtcagtgtatctaccattctggggtctagaggacagtggccctcttcccacagctccactaggcagtgtcccagtagggactctgtgtgggggctccaactccacattttcactgtgtgctgccttagtagaggttctccatgagggctctgcccctgcagcagacttctgcctggacatccaggcatttccatacatactctgaaatctaggtggaggcttccaaacctcaactcttgccttctgcacacccacagtcccaacaccacatggaagctgccaaggtttggggcttgcaccctctgaagcaatagcctgagctgtgctttggccccttttagccacagctggagctggagcagctaggatgcagggtgccatgtcccagggctgtgggcctgtcccatgaaaccatttttctgtcctgggcctccaggcctgtgatgggaggggctgccacaaaggtgtctgaaatgccctggaagccttttccccattgtcttggctattagcatttggttcttcttcacgtatgcagatttctgcagccttttattcctccccagaaaatgggtttttcttttctaccgcatgtccaggctgcaaattttcccaaggtttatctgcttccctttaaatgtaagttctagtttcaggtaatctctttgttcatgcatataagtatatgctgttagaagcagccaggtc

SEQ ID NO: 659 - DNA, 2351 bp, Homo sapiens
aggagcaaaggcgccatggctgtggagtcccagggcggacgcccacttgtcctgggcctgctgctgtgtgtgctgggcccagtggtgtcccatgctgggaagatactgttgatcccagtggatggcagccactggctgagcatgcttggggccatccagcagctgcagcagaggggacatgaaatagttgtcctagcacctgacgcctcgttgtacatcagagacggagcattttacaccttgaagacgtaccctgtgccattccaaagggaggatgtgaaagagtcttttgttagtctcgggcataatgtttttgagaatgattctttcctgcagcgtgtgatcaaaacatacaagaaaataaaaaaggactctgctatgcttttgtctggctgttcccacttactgcacaacaaggagctcatggcctccctggcagaaagcagctttgatgtcatgctgacggaccctttccttccttgcagccccatcgtggcccagtacctgtctctgcccactgtattcttcttgcatgcactgccatgcagcctggaatttgaggctacccagtgccccaacccattctcctacgtgcccaggcctctctcctctcattcagatcacatgaccttcctgcagcgggtgaagaacatgctcattgccttttcacagaactttctgtgcgacgtggtttattccccgtatgcaacccttgcctcagaattccttcagagagaggtgactgtccaggacctattgagctctgcatctgtctggctgtttagaagtgactttgtgaaggattaccctaggcccatcatgcccaatatggtttttgttggtggaatcaactgccttcaccaaaatccactatcccaggaatttgaagcctacattaatgcttctggagaacatggaattgtggttttctctttgggatcaatggtctcagaaattccagagaagaaagctatggcaattgctgatgctttgggcaaaatccctcagacagtcctgtggcggtacactggaacccgaccatcgaatcttgcgaacaacacgatacttgttaagtggctaccccaaaacgatctgcttggtcacccgatgacccgtgcctttatcacccatgctggttcccatggtgtttatgaaagcatatgcaatggcgttcccatggtgatgatgcccttgtttggtgatcagatggacaatgcaaagcgcatggagactaagggagctggagtgaccctgaatgttctggaaatgacttctgaagatttagaaaatgctctaaaagcagtcatcaatgacaaaagttacaaggagaacatcatgcgcctctccagccttcacaaggaccgcccggtggagccgctggacctggccgtgttctgggtggagtttgtgatgaggcacaagggcgcgccacacctgcgccccgcagcccacgacctcacctggtaccagtaccattccttggacgtgattggtttcctcttggccgtcgtgctgacagtggccttcatcacctttaaatgttgtgcttatggctaccggaaatgcttggggaaaaaagggcgagttaagaaagcccacaaatccaagacccattgagaagtgggtgggaaataaggtaaaattttgaaccattccctagtcatttccaaacttgaaaacagaatcagtgttaaattcattttattcttattaaggaaatactttgcataaattaatcagccccagagtgctttaaaaaattctcttaaataaaaataatagactcgctagtcagtaaagatatttgaatatgtatcgtgccccctccggtgtctttgatcaggatgacatgtgccatttttcagaggacgtgcagacaggctggcattctagattacttttcttactctgaaacatggcctgtttgggagtgcgggattcaaaggtggtcccaccgctgcccctactgcaaatggcagttttaatcttatcttttggcttctgcagatggttgcaattgatccttaaccaataatggtcagtcctcatctctgtcctgcttcataggtgccaccttgtgtgtttaaagaagggaagctttgtacctttagagtgtaggtgaaatgaatgaatggcttggagtgcactgagaacagcatatgatttcttgctttggggaaaaagaatgatgctatgaaattggtgggtggtgtatttgagaagataatcattgcttatgtcaaatggagctgaatttgataaaaacccaaaatacagctatgaagtgctgggcaagtttactttttttctgatgtttcctacaactaaaaataaattaataaatttataaa

SEQ ID NO: 660 - DNA, 177531 bp, Homo sapiens
aagcttggcattccagggcccacacctctgctttttttgggaactactttgtcctaccatcaggtgagtgtttttgagctcactctttggcttcttatgattggagagagcagcttagttccatcagtaaaactgcttctcctcaggaggaaggtctgaggttttacactttcagaaacagtgtataggcatcatccagagcatggcaaggtttaccccgggactctcttgctaactctcaggaacctcaggtttgcctcagttgaacagtccaaatctcaggtatatcggcaacctgatgttcagaacttgatgtgcagactttgtgagcaccataaagaacatttttcttttgccccatgtaggttcccaggaaggtacagtcatatttagttagtattaagagtaggaaaaggagcccccatttgtggcttgctatctgtgtacatgagagtcaaactttcctctctatagcaagagctcaggagtagcctttttcccctacctcctggacagctttgaaactcactttattagggagctcaagtatttaccattgggtcattcgcacttgcttgaatcctctccaaaaaatgctaaatcccctgaaggtatttccatggctctaccccagctcttactccccatgacatcttttgcagctttgggagtcagagcaaaggtgttctgctttacttcttttatttcaaaggctgcaccttatgggtgagtctgagcagggagtggatataactgagatgagatagtggttatctatcaaactcagatatttaagcataaaatgaatttgtggttttttttttaaacaaaggcagaatcatatgcaaaatcactagaaaggtgataatttgatgaaattattaaatatttaattttgctgaataaaatgtcatatgtgccacatggactgtgaactttggtcgagcctttgtgcctaacctggtctgatgctctgtctagggcctggcctctggatggaaaattatgagcttatctccacagggccagcagcagcagtagtcagctctgtggcttagatcatctttcccgcatacctgaggcttgtttccctgattccaattcttccaagtgagggttttgttgtctaattactgcccaggaatttcatatttttccctttgcaaaagcaataatttccccgccaccttttctaggtcagttctttagtagatgtaccccccaagataaacattcctgggatctttgtttgcacaggtaaaacatcaaccctgaaatgtagaaaacaggaaagtttgtttttcagtttcagtgaaaacgctgagcaagtgttgtaatttgctgtgtccaatgtgtagaggggacattttctcagaacttccatgttaagctggaaaactggaaagtgagtccactttgtcattctgtcactcactccttttctcactcaacaacatgcctcagacttatctaaatctgctagactaaaagaggtccctgatgtctgtaacttcctaattctgctagaattctagagcgagctgatgaaataaatgaaaaggatgatgaacagagataaaagactgtgcattcccttctgacactcactctctttccctcagcctcagtttccccatgtgcccctggaggtgatcattcaaggatttatgagattttagagacaatacatgaaaaagcaaaaaggcatcagaaagacaaggagttacctagtttacacacaatgataagtcattcagtatctacagcactttgagaaaattcaagagtgattttaaatttcccatttcaaatacctcctctgttttctctcctttcccttatgatgtctccaaataagattcctctaactgccagcaagtctgatttcattggattcaactgttttcagccccaattagacgcagggttaagtatatttgaaatattaatcaagggaagcatttccaagatggccgaataggaacagctctagtctgcagctcccagcaagattgaggcagaagataggtgacttctgcatttccaactgagtcttagcaacaggcagaccaggagataccctcccgtgcctcgatcggcaggtgccacacccacggagacttgctcactgctagtgcagcagtctgagatccacctgatatgctgcagcttgatagaggaggggtatcagccattgctgaggcttgagtagcttactgtgtaaacaaagaggcctggaagcacgaagtgggtggagcccaccgcagctcagcaaggcctactgcctctgtagattccacttctgggggcagggcagagtagaacaaaacacaggagacagacagcctctgcagacttaaacgtccctgtctgacagctctgaagagagcagtggttctctcagcacggtattcgagctctgagaacggatagactgcctcctcaaatgtgttcctgacccccctgtagcctgactgggaaccactttccagtagaggccgacagacacttcaaacatgcgggtgcccctctgggatgaagcttccagaggaaggatgaggcagaaatatttgctgttctgcagcctctgcaggtaatacccaggcaaacagggtctgaagaggacctccagcaaactccaaaagacctgcagctgaggagtctgactgttagaagaaaaactaacagacagaaatagcatcaacatcaacaaaaaggacatccacaccaaaaccccatttgtaggtcaccaacatcagagaccaaagatagataaaaccataaagatgggaagaaaccagagcaaaacagctgaaaattccaaaaaacagagcatctcttctcctccgaaagatcacagctcctcaccagcaagggaacaaaactggacagagaatgagtttgatgagttgacagaagtagtcttcagaaggtcggtattagcaaacttatccgagctaaaggagcatgttctaacccatcacaagatagctaacaaccttggaaaaaggttacatgaatggctaactaaaataaacagtgtcaagaagaccttaaatgacctgacagctcaaaaccatggtacaagaacttcgtgatgcatgcacaagcttcaatagccgattcgatcaactgtaagaaaggatatcagtgatcaaagatcaaactaatgaaataaagcaagaagacaagattagagaaaaaaaagtgaaaagaaatgaacaaagcctccaagaaatatgggactatgtgaaaagaccaaatctacatttgacaggtgtatcagaaagggacagggagaatggaaccaagtcagaaaacactcttcaggatattatccaagagaacttccccaaactagcaaagcaggccaacattcaaattcaggaaatacagagaacaccacaaagatactcctcaaaaagagcaaccccaagacacataattatcagattcaccaaggttgaaatgaaggaaaaaatgttaagggcagccagagagaaaggtcggcttccccacaaagggaagtccaccagactaacagcagatctctcagcagaaaccctacaaaacagaagagattgggggtcaatattcaacatacttagggaaaagaattttcaacccaaaatttcttatccagccaaactaagcttcataagtgaaggagaaataaaatactttacagacaagcaaatgctgagagattttgtcaccaccaggcctgccttacaagagctcctgaaggaagcactaaacatggaaagaaagaactgctaccagacactgcaaaaacatgccaaatggtaaagaccatcgatgctatgaagaaactgcatcaattaatgggcaaaataaccagctaacatcataattgcaggatcaaattcacacatatcaatattaaccttaaatgtaaatgggctaaatgccccaattaaaagacacagactgatgaactggataaagagtgaagacccattggtgtgctgtgttcaggagacccacctcacatgcaaagacacacataggctcaaaataagaggatggaggaagatctactaagcaaacagaaagcaaaaaaaagcaggggttgcaatcctattctctgataaaatagactttaaaccaacaaagatcaaaaaagacaaagaaggccactacataatgataaagggatcaattcaacaagaagagctaactatcctaaatatatatgcacccaatacaggagcacccagattcataaagcagtccttagagacctataaagagacttagactccacacaataataatgagaggctttaacaccccattgtcaatattagacagatcaatgagacagaaggtttattttattttattattatttaagttttagggtacatgtgcacaatgtgcaggtttgttacatatgtatacatgtgccatgttggtgtgccacacccattaactcgtcatttagcattaggtatatctcctaatgctatccctaccccctccccctaccccacaacagtccccggagtgtgatgttccccttcctgtgtccatgtgttctcattgttcaattccaacctttgagtgagtacatgcggtgtttggttttttgtccttgcgatagtttgctgagaatgatggtttccaccttcatccatgtccctacaaaggacatgaactcttcattttttatggctgcatagtattccatggtgtatatgtgccacattttcttaatccagtctatcgttgttggacatttgggttggttccaagtctttgctattgtgaatagtgccacaataaacataagtgtgcatgtgtctttatagcagcatgatttataatcctttgggtatatacccagtaatgtgatggctgggtcaaatggtattcctagttctagatccctgaggaatcgccacactgacttccacaatggttgaactagtttacagtcacaccaacagtgtaaaagtgttcctatttctccacatcctctccagcacctgttgttttctgactttttaatgatcaccattctaactggtgtgagatggtatctcattgtggttttgatttgcatttctctgatggccagtgatgatgagcattttttcatgtgtctgttgggtgcataaatgtcttcttttgagaagtgtctgttcatatccttcacccacttgttgatggggttgtttttttcttgtaaatttgtttgagatcattgtagattctggatattagccctttgtcagatgagtaggttgcaaaaattttctcccattctgtaggttgcctgttcactctgatggtagtttcttttgctgtgcagaagctctttagtttcattagatcccatttgtcaattttggcttttgttgccattgcttttggtgttttagacatgaagtccttgcccatgcctctgtactgaatggtattgcctaggttttcttctaaggtttttatggttttaggtctaacatgtaagtctttaatccatcttgaattaatttttgtataagttgtaaggaagggatccagtttcagctttctacatatggctagccagttttcccagcaccatttattaaatagggaatcctttccccattgcttttgtcaggtttgtcaaagatcagatggttgtagatatgtggcattctttctcagggctctgttctgctccattggccaatatctctgttttggtaccagtaccatgctgttttggttactgtagccttgtagtatagtttgaagtcaggtagcgtgatgcctgcggctttgttcttttggcttaggattgacttggcaatgcgggctcttttctggttccatatgaactttaaagtagttttttccaattctgtgaagaaagtcattggtagctttatggggatggcattgaatctataaattaccttgggcagtatggccattttcacaatattgattcttcctacccatgagcacggaatgatcttccatttgtttgtatcctcttttatttcattgagcagtggtttgtaattctccttgaagaggtccttcacatcccttgtaaggtggattcctaggtattttattctctttgaagcaattgtgaatgggagttcactcatgatttggctgtttgtctgttattggtgtataagaatgcttgtgatttttgtacattgattttgtatcctgagactttgctgaagttgcttatcagcttaaggagattttgggctgagacgatgggtcctggacttttttggttggtaagctattgattattgccacaatttcagagcctgttattggtctattcagagattcaacttcttcctggtttagtcttgggagggtgtatgtgtcgaggaatttatccatttcttctagattttctagtttatttgcatataggtgtttgtagtattctctgatggtagtttgtatttctgtgggatgggtggtgatatcccctttgtcattttttattgcatctatttgattcttctctcttttcttctttattagtcttgctagcgttctatcaattttgttgatcttttcaaaaaaccagctcctggattcattaattttttgaagggtttttgtgtctctatttccttcagttctgctctgattttagttatttcttgccttctgctagcttctgaatgtgtttgctcttgcttttctagttcttttaattgtgatgttagagtgtcaattttggatctttcctgctttctcttgtgggcatttagtgctataaatttccctctacatactgctttgaatgtgtcccagagattctggtatgttgtgtctttgttcttgttggtttcaaagaacatctttatttctgccttcattttgttatgtagccagtggtcattccagagcaggttgttcagtttccatgtagttgagcagttttgagtgagcttcttaatcctgagttctagtttgattgcactgtggtctgagagacagtttgttataatttctgttcttttacatttgctgaggagtgctttacttccaactatgtggtcaattttggaataggtgtggtgctgaaaaaaatgtatattctgttgatttggggtggagagttctgtagatggctattaggtctgcttggtgcagagctgagttcaattcctgggtatccttgttaacttttggtctcgttgatctgtctaatgttgacaatggggtgttaaagtctcccattattattgtgtgggagtcaaagtctctttgtaggtcactaaggacttgctttatgaatctgggtgctcctgtattgggtgcatacatatttaggatagttagctcttcttgttgaattgatccctttacctttatgtaatggccttctttgtctcttttgatctttgttggtttaaagtctgttttatcagagactaggattccaacccctgcctttttttgttgtccatttgcttggtagatcttcctccatccctttattttgagcctatgtgtggctctgcatgtgagatgggtttcctgaatacagcacactgatgggtcttgactttttatctaatttgcccatctgtgtcttttaattggagcatttagcccatttacatttaaggttaatattgttatgtgtgaatttgatcctgtcattatgatgttagctggttattttgctcgttagttgatgcatttttttcctagccttgatggtctttaccttttggcatgtttttgcagtggctggtaccagttgttcctttccatgtttagtgcttccttcaggagctcttttagggcaggcctggtggtgacaaaatctctcagcatttgcttgtctgtaaaggattttatttctccttcacttatgaagcttagtttgtctggatatgagattctgggttgaaaattctttcccttaagaatgttgaatattggtccccactctcttctgccttgtagagtttctgccaagagatcagctgttagtctgatgggcttccctttgtgggtaacccgacctttctctctggctgcccttaacattttttccttcatttcaactttggtgaatctgacaattatgagtcctggagttgctcttctcgaggagtatctttttgacattctctgtatttcctgaatctgaatgttggcctgccttgctagattggggaagttctcctggataatatcctgcagagtgttttccaacttgcttccattctccccatcgctttcaggtccaccagtgagacgtagatttggtcttttcacatagtcccatatttcttggaggctttgttcatttctttttattctttttctctaaacttcccttctcgctttatttcattcatttgatcttccatcactgataccctttcttccagttgatcgcatcagctcctgaggcttctgcattcttcatgtagttctcaatccttggccttcagctccatcagctcctttaaggacttctctgtattggttattctagttatccattcatctaattttatttcaactttttaacttctttgccattggtttgaagttcctcctgtagcttggagtagtttgatcgtctgaagccttcttctctcaacttgccaaagtcattctccatccagctttgttccattgctggtgaggagctgcattcctttggaggaggagaggcactctgctttttagagtttccagtttttctgctctgttttttccccatctttgtggttttatctacttttggtctttgatgatggtgatgtacagatgggtttttggtgtggatgtcctttctgtttgttagttttccttctgacaggaccctcagctgcaggtctgttggagtttgctagaggtccactccagaccctgtttgcctgggtatcagcagtggtgcctgcagaacagcagtggctgtagaacagcagatattggtgacctgcaaatgctgctgcctgatcgttcctctggaaggtttgtctcagaggagtacctggccgtgtgaggtgtcagtctgcccctactggggggggggtgcctcccagttaggctgctcaggggacagggacccacttgaggaggcagcctgcccgttctcagatctccagctgcgtgctgggagaatgactactctcttcaaagctgtcagacagggacatttaagtctgcagaggttactgctgtctttttgttcatctgtgccctgcccccagaggtggagcctaaagaggcaggcaggcctccttgagccgtggtgggctccacccagtttgagcttcccagctgctttgtttaccttatcaagtctgggcaatggcaggcacccctcccccagcctcactgccgccttgcagtttgatctcagactgctgtgctagcaattagtgagactccatgggcataggaccctccgagccatgtgcaggatataatctcctggtgtgccgttttttaagcccgttggaaaagcacagtattagggtgggagtgacctgattttccaggtgctgtctgtcacccctttctttgactaggaaagggaactccttgaccccttgcgcttctcaagtgaggcaatgcctcgccctgcttcggcttgtgcacagcacgctgcacccactgtcctgcacccactgtctggcactccctagtgagatgaacccggtacctcagatgaaaatgcagaaatcacccgtcttctgtgtcactcacactgggagctgtagaccggagctgttcctattcggccatcttggctccaccccccgagttttggcttttaattgaaagtgtattgatgtgggaaggagataatgccatgcatttatgagcacatattagagggtctgagacaatgcatgtgataaaaggtcacctaaggaagaaaaaaagaacaagggaagacactggaaagaacgtgatgctgggagtccctgggccaccaaagtctggagaaaagtggtaaccacaaggctcccagcctagtttcactgaagacctcgacactaggtgacttatgggatccttggtaggacaagccttgaaaagttttacaatagcaaatgtggacgttgtcagaaccaaatgatgtcacgtgtgtatttgtgtgtgtgtgtcagtgtgtgtgtttaaaaatcatgacaaataaagcaggctgtgaagaggggattcccatgctcgtgtgcctgataacacaactatcacaaacgctttgcgaaaccacaagtttgcacaaaggcaatcccaaccttacacaaaaatatttctgcaagggcacctgcccagcgactgcctgtccaaccttggtgtggtgtcacccttgttattgatcttttagcaaaggagaattatttcaaaactgatatgaaatcctcctcatattttccttggaacatctttgtcttgctttacctccctgaatttccacatagtttgtaatggtcacaaactatgtgcatagtcagcaatacattttttgtttactttgatgctacagtttctaattttgctttatttaatgcttctcaatatgcttgtttaactgttgcagatcccgctgaaattacgcttaggaggacttcttcaaccagaaaaacccattgttctaaaggttgagtcaagggatgggaccgtaagtggaacctgaatttccctaaggacttctgctttgctcttcaaaaaagctgtgacctagaacaccagagacctcaaattactttgtgaatagtaccctgaaatgaagatgggcttcatccactgtactgcataaataaccagggattctgtacatgcactgagctctctccctgtctgtgtagagtgttatacttgggaatataaaggaagtgaccaaatcagtgcttgggaagtagatttggcttctttgtttctcacaggacaatctcagccacccctagttagcaccattaactcctcctgagctctgataaaagaatcaaaatttctcaataatttcatccaaaattattaatgaaaataagaattattttgatggctctaacagtgacatttatatcatctgttttatctggagcattctataataagtttatattaagcaaatcaataaaaacctcttacaaaagtatcatcggatactttcctgaacattaaggagaaatctatagaactgaatgaatgagaaccaacaagtaaatatatgtgatcattgtaaccattgttggtgtggggcatttgtcagaactccaatgtgattattaacataggtgagaattaatccactgtgactttgcccattgcttagaaagaacattcatagtttaattatgccttttttgaccaagcacagtggctcatgcctgtaatcccagcactttgggaggccgaggtgggtggatcacctgaggtcaggagttcgagaccagcctgaccaacatggtgaaaccccatctctactaaaaatacaaaaattagctaggtgtggtggtatgcacctataatctcagctacccaggaggctgaggcaggagaatcacttgaacctggaggcagaggttgcagtgagccgagacgcaccattacactccagcctgggtgacagagtgagattccatctcaaaaaaaaaaaaaaaaaattatgcctttttgaagcacatacattttataacatacaactgaatcccttattatattattagttttgatttaatgttttcaaaccatctcccctgatatttctgggagatgggaaacatgttttcttacacctcttgcattccattctcaactcccaactgtcttactgcaatgaacacttaataagaaacagtcaattggtcaattgattgggcaacaggctaaacacactcattccttgtctgttcccacttctttctttactttcccttcctgagtaacttatcctaaagtcattaggtgggtggcagccagatggtggccacacattaaggtagaaaagagagtgtcatgatggttccaagtcagagacctagtagggtgaggatcaagtaggtgttcacgtggagaaacagcccggcctgtgtgtgggagtccaagcaagcagagaaaatgtcgacacagaggggtggcctgaaaaagcagccagagcctaaacagggcatggagaacatatttagggcatgaggtgaggagggcatccatgagtgggaagggatgggtgaggtttcactacataaaggggattgatgaaataagtaaataaagtatactggaagccaggtgtgtcacttttgcagaaaagagtcatggattcagaaagggagaaaactagcaggaatcctatgaaattagattaaaatggatgtatccatgtatattcatacccttctagatagataaatggttagataggtgataaaaagataacaagaggacaagataattagatagacataaatgtatgtatgtgtttgtgtgtgtgtacaaaaaaacatatactccctacttctctccactgatagggctaggtaacaatggcatttcaatagcaatgagcacacttagtggccagatcttggcttattaataccattttccactgaaaggaaccagagctttttagagaaatggctgattccagggccaggattaagaatgttcaagataagcctaggatacattttgtgccaggaagcaagaagatgttcaaatgatttccaagtaatgtttggaaatgatatttgaaaatgatttccaaatgatatttccaaatgatttccaaatgatatatggaaacacttaaagactccactaaagaactattagatctgataaacaaattcagtaatgttgctggatacaaaatcaacatacaaaaaccagtagcatttctgcatgccaacagtgaacaatctggcaaaaataaaaaatgtaatcccatttacaataaccccaaataaaactaaatacctgggaattaacttaagagaaagatgtctacaattaatattgtaaaacactgatgaaggaaattgaagaagacacaaaaaagaaggatattccatgtttatatattgtaagcattaatattgttaaaaatgtccatactacccaaagcaatgcacagattcaatgcagtctctcaaaataccaatggcattcttcaaagaaatagaaaaaaaaaaaccctaaaatttgtatggaaccacaaaagacccagaatagcgaaagctaccttcagcaaaaagaacaaaactggaggaatcatattacctgacttcaaattatactacagaggtataataaccaaaacagtatggtacttgtataaaaacagacacagaccaatgaaatagaatagagaacccagaaacaattccacacacctacggtgaactcattttcaacaatgttgtcaagaacatacactgggggaaaagacagtctcttctggtgctgggaaagctggattttaacatgcagaataatgaaactagaaccctgtatctcaccagacacaaaaatcaaatcaaggtggacgaaagactgaaacctggctgagtgccgtggctcatgcctgtaatcccagcattttgagaggccgaggcgggtgtatcacttgaggtcaggagttcaagaccagcctggccaacatggtgaaaccacatgtctaccaaaaaatacaagagttagctggacatgctggtgcgtgcctgtagtcccagctacacagaaggctgaggtggcagaatcacttggacccaggaggcggaggtggcagtgagctgagatcatgacaatgcaccccagcctgggcaagagagtgagactctgtcagaaaaacaaaaaacaaaaaaacaaaaaacaaaactgaaatctgagacctcaaacgatgaaactgctacaagaaaacattgtggaaactcttcaggatattggtctgggcaaaactttctgaagaactaccccacaagcacaggcaaccaaagcaaaaatggacaaatggatcagatcaagttaaaaagcttctgtaccacaaagaaagcaatcaacaaagtgaagacacaaaccacagaatgggagaaaatattttcaaagtcacactctgacaacagattaatagccagaatacatgaagcgctcaaacaactctgtaaggaaaaatctaataatccaatcaaaaaatgggcaaaatttgaatagacatttttcaaaagaagacatacaaatgccacataggcatatgataaggtgctcaacatcactggtcattagagaaatgcaaatcaaaaccacaatgagatatcatcttaccccagctaaaatggtttttatccaaaagacaggcaacaacaaatgccagcgagaatgtggagaaaagggaacccttgtacactgttggtgtaaattagtgcaaccactatagagaacaatttggaggttcctcaaaacattaaaattaacattaaatagagctaccacaatatccagaaatccccatgctgggtatatacctggaagaaaggaaatcatatattgaagagataacatcactccaatattcacaatagccactattcacaaatgccaagatttggaagcaacctaagtgtccatcaacagatgaatggataaagaaagtactccaattatacacaatggagcacaattcagccatgaaaaaagcatgagatcctgttatctgtaataatatggatggaactggaggtcatcatgttaagtgaaataagccaggcacagaaacacagatattgcaagttctcacatacttgtgggatctacaaatcaaaacaactgagctaatgtctgggccttagtcagtgttgtacccaagtactgggagcacagcttttaaaatacatcatgaatgctttaatacaggaatgaatagatgagaggcacaaactggttgggtgttcttctgatacacagtatcttccttgacagattcagtacaactctcaacaggtaagtctcttcatgttatgttaccttatgaggaattaagtggcagaacatgatttctattattttcctttgcagaacaagaccaactttattagttgggacacagtgtggctgcatttgagtcccaagcaaccattagtctattgctatcaccacagagtcagaggggatgagacgcccagcaatctcacccaagacaactccaccaacattcctggttacccaccatgtgtacagtaccctgctaggaaccagggtcatgaaagtaaataataccagactgtgcccttgaggagctcacctctgctaagggaaacaggcatagaaacttacaatggtggtagagagaaaagaggacaataggactgtgtgagggggataggaggcacccagaggaggaaatggttacatttgtgtgaggaggttggtaaggaaaaattttagcagaaggggtctgtctggctgggcttggaaggatacgtaggagtcatctagagggcacaggtacactccaggcagagggaatttcgtgggtaaagatgtgtaggtgtggcttgtgaggatggatttcaattattctagaatgaaggcagccatggaggggcaggtgagaggagggttaatagatttcatgccaatggctccacttgagtttctgataagaacccagaacccttggactccccgataacactgattaagcttttcatgattcctcatagaacatgaactcaaaagaggtcagcaaaggggtgtgtgcgattctttgctattggctgcagctatagccctgcctccttctccagcacataaatctttcagcagcttggctgaagactgctgtgcagggcagggaagctccaggcaaacagcccagcaaacagcagcactcagctaaaaggaagactcacagaacacagttgaagaaggaaagtggcgatggacctcatcccaaatttggcggtggaaacctggcttctcctggctgtcagcctggtgctcctctatctgtgagtaactgtccaaactcctctctttgtttccttggacttggggtgctaatcgggccccttttcccttatctgttttgaagatcaaaagagatgttcaaggagaagtagctgaagtgttggacgctacaaacgcatagaagttattattatcttatgcagatctatgaatgaataaataagcatttctcccatccaccttctaattttggtgactaggagggtttagggacagcatttggtagtgggaatgatttgattagcttagatctgacgaagactaatcaatgaaaacatggcagcggcagattacaaactgctgatcatgatggacagtgtgatcctcatccccttcccaggctctggggattctgggtacaggaaggagtggcttgcatttttgtctcattaattcgctttctgggttctgtgtctgctggaagggatgtgtagctgtattgcccctgtagacctggttcctgctcccccgccttccaacccaggatatcatttacataacgcaccaggggacaccaagacttcatgggaagctgtcccctggctcttccctctttcctgtgccatgcccctgaaaatcccctccctcctatgagtcactcctccaccctgtcatacacaggatggtttatcttgcaatgattaacctctagagcaaaggagacctggaggaagtttcgaggatttattctttgctttaatctttttcctcccgtctctgggaggctaggattaatatagagctttgtttctcacctaatgggaatctactagcagcctgaaaaggcaggagccatgaaagccaatttggattttacatatttttcccctttatgttacagtacaggagggcaaaccctctcactggtgggattcctggcatcctagagcaggtggagagaagagttactttccactgtgggtagtggaggctccacctgtcccattaacttctacctcaatttgacttttattaagagcagggaaccacaatgacatgaaaatagacactataaacctcattttaattctttcacagaaagcttaggaattcagtgagttgtggcaacatggtttccattgtctaacatttttaaatgaattgatatggtttaaattcattcatttttaaaccagaattttttggagatagactatttccagcatgttccttctggatggtaaaacagggctgttagttcagtatttgtgacaataagtgtgtgtaaaataatgtcacctttcctgaatgtcaggaatatgagtctaatgcacaaatgtatacctctaagacaagactgcacgtcttttcaaatatacctgtccggccatttattttaataactccttttcgaatatacctgcttagcagattgtcttaaactctcaggacaggggagtaagcaagactgtgagccagtgacgatagcaaaggcttccaggtaggatccatatgaagtgagaaaatattcctcagctctcagggtagaactccaaagagatattcatgggtcctggccccaccgtggaggtcactcaaagggcaaacaggttggcatctcatctgcttcaagcctggacacaggggcaccatctgtgtcactctgtgtgtggtctgccatgttgtgggccggtcactacagactcgggcagccaggcagacaatgccttagccttagacaatgctggtgcagcccaggagtcagaaaatgcagtgtagaccaggccctccttaggccaacacaattacatgcaatagatgactggcttttctgttagtctcttcactggacccaaaggctgcattactctaccagaggggagctggaaagaaactaaagagttcgcccagcacagcatctgccttgacatggtaccatgtgaatctagacactcaccaagatctttccttgggggccaatgctgctgacacattaactcaatagcttgtcctcacctgagaggtcaggtaatgtgtttaaagttcaggagcagagattagtgtcattgatttgacatggctgtgacaacaaaggagggaactgaagtgggaatacccaaggccaccctggctttggcaggtggtgcacgcacttccactaactgttctggggcagggaaccaaatgtatgactgggcctgctcatgctgcccctgctgagtcctccaaaccctgcccttcatgtaatttctcagttttattttatcacattttataagtcactggatgtttacaaaatgtttggaacctatactgccttgaaggctaacctctaaagaggagtaaacaaggtcttaatacaactctccgggacgttttatcattacttatcttatatgccatactgcaccatttgctatcaacaggaaagtacctggactttggaaggtccctctgtgtcttttagctgaaagtacatatgaggcatgtggattcttttatgcacatcatctttttcagccacatttttgtagtttgcctctctggagccaactgtgtggggctagcagcttcacagctgaatcagtgtctggcaacctcttccttcagcctctcttcttcctccagttttccatccctcagtcacaccggagggggaaggtctgcaaggatccagaaccatcagttggaggagtttgcacatgactcatgaaagatgagttccaggcaggcctgccatagtgaacaccaggcttaatgggtttttcctcagagatacttcacgtacagaggcagtgaactgactgctttctggttgaccaccttgaaaaagatgagtgtgcctggcactgtgcttctcaggtgagtatgacctgagaagtattagttgctggttcttctgcacacaatcattcaaggacatatggatcaaccatcctcctcaacagctcaaatcaaccagatcatctgaccacagagactgaggtgtacctgaaagctgcccacatttctataaggccaatagaagccatgaacacagttgtcaatctgtagaaataaggactccatgactcctccaaggcctctctgtgaatgaacgtttaagaagggctagatcctaaaacagggtcagagcttagagggaagaaaaagcataaacatttctgagcaaattgtaagggcagtgtcaccataggctcccagtgaccctctgtgattgagtgcatacagtgatgcaaaatctcatcatcagtgcaaaagacaaaaaaaatcttactctttctacctaggatgagagtccccaaatcagcgaagagtccacttactaaacagacataaggaaatgaagtgtcctggaagaattcctgcctgaacctctcaggagcatttgaggacatttatcaagtattcactccaggattgggactatgaagacttcagctgctttcagctaatcattgagacttttcaggggtctcagaatagtcaggaaaggacctgatgagtgaatgcaattactgatgttggagttgctgttattatttatcgtgtacatattacctccctctcttgaccattccagttcctgagtaactcaccagccctctgatctataaagtcacaatccctgtgacctgatttctgtttcactttgtagatatgggacccgtacacatggactttttaagagactgggaattccagggcccacacctctgcctttgttgggaaatgttttgtcctatcgtcaggtgagttgcttgagcttcctcttttgcttcttatggttgcaaacatcagcttagttccatcagtaaaaatgcccctccttgggagggagttctgaggtttcacattttcagaaatggtgggactgggtgcagtggatcatgcctgtaatctcagcctctgtgaggccaagactggcaaattgcttgagcccaggagtttgagaacagcctgggcaacacagtgagacacctgtctctagaaagaaaaaattacctgtgcatgatatggtagcccatgcctgtagtcccagctactctgaatgttaaggtgggaggattgtatgaacccaggaagtcaaggctgtattgagctgtgatcgcaccactgcactccagcttggtcaacagaacaagacagaaaggaagaaagaaagagagagagagaaagaaagagagaggaaggagaggggaggggaggggaggggaggggggaggagaggagaggagagaaaaggagaggagagaggagaggagaggaaaaggtgtgtaggctccacccaaagcatggccaggtttacccctggagggaaagtcacaagctcatgtccagaaggccagtagcagcaagctgctctccagcccagatttcctatcctgtgtacctggagcttgtttctcagattctaactctcacaactgaagcctctgttgtctgattactatctgagaattctacacaattttaccctcgataaaagcagtaatttcttcttcatctttcccagatcaactcttgtagtagatcaacatttctgggaccttcttttgcatggttaaaacatcacagctgaatcttagcaacaggaaggtttgtttttatgtttcagaagtgaaagctcagagcacgcattgtaatttgctgggtgtgatgtgtagaggtggcatttctccatcttttctgtgttaagctagaaaactggaaaggaagtctactttctcattcactcactcactttctcactcaacaacatgccttagacttatctaaatctgcaagactaaaagaggttcctggtttctttaactttctaattctgctagagttctagagagagcacatgagataaatgaaaaggatactgatggaggagattaaaaaattgtgcattccctgcagacactcacttttcctcacctcagtttcacccctgcccttgcaggtgatcattcacggggttaggagactttagagagaataaaagaaaaagcaaaaatacatcagaaagacaaggaattacttactggtcatagacaagggtgagtccttcagtacttagagaaaattcaagagtgactttaaattccccacttcaaatatattctctgttttcttgtctttcccttaagacatctctgaatagcttccttcaactgccagtgaaagatagcaggcctgatttcattggacgcaactgttttcagccccaattagaggtagggtttattctatttaaaataataatcaacttgtattttgtttcctctcccagggtctctggaaatttgacacagagtgctataaaaagtatggaaaaatgtgggggtgagtattctgaaaacctccattggatagacctgctactgtgaggaggttaccccactgcaggatagtctctgcccaggtcttcatgggatgaagctcttgtcaacctaaatacaaacagagagaggttctctgaaagaagaggataattacttgggagtagaatattgcaatgggaatctgcttgccgttataaactatgtgcaaattcagggaggtaaacaagacaaagatgctccatagaaaatatgagaagaatctcataactgttttgagataattattgttagctacaaagatcaataacaagggtgatgccacaccaaggttggacaggcagttgctggacaggtgtccttgcagaaatatttttgtgtaaagttgaaatagcctttgtgcaaagttgtggtttttgtagacacttttgtaatagttttgtttccaggaacacaagcataagaatcctctcttcatagccttcttgggatttatttgtcagggttaaaaaacaattagtgacatcactttggttctgataaagttcacactcgctattgtaaaacttttcgaggcttgtcctaccaaggatcccatgtgtcaccaggtatcgaggtcttcagtctgaactaggctaggagcattgtggttaccacttttctgcaggttttggtggcccagggactcccagcatcgccttctgtccagtgtctgcctattcccctcttctttttttcttccttaggtgcccttttatcacatgcattgtctcagacccttctaatatgtgctcataaatgcatggcatcatctccttcccacattgattcactttcaattaaaagccaaaactccttcatttagactgaatttaacatgtgcttttgaaagaagggttgagagataatagagaaacagattgggaaaccacttatgctccacttttttaaactttctctgcaagtatggaattttttgttctgctttgttgtttaaatttaagccaaaacttcttaatagaaggatatacaaatatttattggtttataccattgcacttactttgaagaagagatgctgaatattattaaaccattgtgttccctggtgggctgatggactgtgattttataaggtggtctcagccaattgcagcagctgttccctgtcagaggggctagaggtttggtgagagcagtggatgaggtgcagtggtgtgtttgttcactagaagcaagtgggagaaagctttgcctctttgtacttcttcatcttctcccctcaagtcctcagaatccacagcgctgactgtggagtgctgtggagctggcatggcccatacaggcaacatgacttagtagacagatgacacagctctagatgtccatgggccccacaccaactgcccttgcagcatttagtccttgtgagcacttgatgatttacctgccttcaatttttcactgacctaatattctttttgataatgaagtattttaaacatataaaacattatggagagtggcataggagatacccacgtatgtaccacccagcttaacgaatgctctactgtcatttctaaccataatctctttaaagagctcttttgtctttcagtatctcttccctgtttggaccacattacccttcatcatatgaagccttgggtggctcctgtgtgagactcttgctgtgtgtcacaccctaatgaactagaacctaaggttgctgtgtgtcgtacaactaggggtatggattacataacataatgatcaaagtctggcttcctgggtgtggctccagctgcagaatcgggctagtgaagtttaatcagctccgttgtccccacacagaacgtatgaaggtcaactccctgtgctggccatcacagatcccgacgtgatcagaacagtgctagtgaaagaatgttattctgtcttcacaaatcgaagggtaagcatccattttttgaaatttaaataatgattgatccactgattaaatttttattttgaaaaaaacatatattcacagaaggttacctaaaaaatgtacaggaaggttccatgtactcttcatcctgtcccgcccagtggtaacatcttgcaatcttgtatattgcaatatatatctagtatattcatattatcaggttggcacaaaagttaaaatggcaaactacaggctgggcataatggctcatgcctgtaatcccagcactttgggaggccgaggcaggtggatcacgaggtcaggagttcgagatcagcctgaccaacatggtgaaaccccatctctactaaaaatacaaaaattagctgcgtgtggtggcatgcgcctgtagtcccagctactcagtagtctgagacaggagaatcgcttgaacctgggaggcggaggttgcagtgagccgagatcacgccattatactccagtctgggcaacccaatgagactccatctcaaacaacaacaacaacaacaacaacaaaaaccggcaaactgcaataacttttgcaccaacctaatactatagtacaggaaattgactttgatatagtttacagagcttttcagatttcaccagttttacatgcccttgtttgtgtgtgtttatgtgtgtgggtagttctaagcaatttttcacattcgtagatttgtgcaacgaccagcaccatcaagatgcagacccattccgtcaccatgtggctccctcctgctgtcctacagtcacaacatggagtttgtctttttctctgacaggttctatatcagagcaaacttttatttatttgaggaggccaatgtattaatatttccttttatggattgttcttttggtgttaagtctgaaaatcctttgcttagccctccttcctacattgctttttctaagagttatatagtttaacactttacaaaatgtaactctattacccattttgtgttaatatttgcataagttatgagatttagatcaaggttcattttctgtggactatggctgtccaaatgttccaacaccattttggaaaggtaggcatattgtcaaaactcagctgagtatattttgtgaatctatttcttattgtttactcctccactaataccacactgtggtgactctagtagctgtacagtaactcttaacatcatatagggcaattctttccactttattgatttatattttcagaatggctttagcttttcttgtcccttgcctttccataaaaattcagaataagcttgtaagtgtctacaaacaaacctgccataattttgataagaattaaagcagaggtgtccaatcttttggcttccctgggccacagtggaagaagaagtgtcgtgggccacacataaaatacacacacacacacacacacacacacacacacacacacacacacacaaatggtctgtgtatagttttcattatatatctaccaccacagataagcaaaaatgtccttgcataataatcctaattatgcactgccccattcagagggtctttcaaaatcattgaacaggttccaagtttgcaatcactgatacagaaaatgtacatatctagctaaacttcactacttttttgatattttttattataaaagaaaagagaacaacataaaactagtggggtacttgacattgtttttgagaaactaatccatcagtatctggcttgatggaagtagttgcaattctcagtgagttctcaaggtgctcatcagatattttggttctaattttactcttcgtgttcttcatccttgaaaatagtagctcacaaatgtaagtgctgccaaaaagcaatgacatgaacaaggtgtgattgtgaagcaagggatatttgtcattgggaagacaggtcttacaaaagtccagtaaagaggcaaaatcaaatttttctataagttgaacatcagattgcagctctaggcattccatttcaaaattgccaggtaacatatatatgtcgactgaaaatggagttgcaaatataccaaaatattgatgattttttcagaaatcttgaaatacctgttttcaaattcctgtatcaaattgaaaagcaaggctgcgtatttttggctgttcacaggaccatgtttagccaacatgtcgaaatgcataaaattgtttgccttaatttgagcttgccataatttcagtttcatatggaatgctgttatggtttgaaacattgtattgttaagttggttttcaacttgaagacacaggtttaactcacttaaatgggccgtcaaacccactaaaaatgctaaatctgtaagccagttttcattgtcaagttctggcaccaattttgtttgataccataaacagcttgatttcacatcacaaagcataaaatctttacattttgccttgacttaaccatcttacttctaaaaagtgaatgacttgctagagtcagcatccatacttttaaggaattcctgaaactagcgatgattcaattcctgggcccttgtgaaatttacagccttgatgacaatttgcatgacgttatctacttttaaagcttgtgcacatggattttcttgatgtattatgcaataatacttcatcaaatgtgagttttgtgtggcaactgcatcatctattaattgtacaagtccctctcttttacctaccatcgccagggcagcatctgtagctatatcacatatgtttacaaaggacaaagaaaattgctttaacatatttttcactgcttcatataaatctcttgatttagttgtgtcttttaatagcatggtgacatttcgatttcttcagtgacattatattcatcatcaatacctctaataaaaatagcaagttgtgccgtatctgtagtgtcagtgccttcatccatcaccaaagcataaaattttaaattagcagttttactctccaaacgtctttcaatagatttcccaatttctccaattctcctggctatagtctggtgagacaaactgattttagaaatatcagtttctcaaggcaaataatatctaccacatcttccagacattgcttaataaactcaccatcagtaaatggttttgatttttttgctattaaatttgctaccacataactaggttttaccttacgattgagtccgagttgtaactttttaaaaaatcttttttgttgaaaagacagactttttttcagttctgctattttgtccttacaacacatacacaccaaatttgtcagcacgtttttgcatataatgcctcttcaaattgtagtctttgaaaactggcacaaattccgtggaaattaagcagagtgcttcgctatttgcctcaacaagaaaaagtcatttgtccacttttcattgaacaatcttccttcatccataatttttgttttttagggttttctttttaagacattgtggaagccattctggaattaaaagcattataatagataagcaactatatttacttttattatggaaattaacagataggaaaatagaacagaaagcaaggtttaataatcaaataagaatacttacatgtcttctaaataatattaaacacctatcatctacaaaggtaggttgaaatattattgataattgctgggttttacttgccaaattgccacaaacacacctaatacctgacagtgtcaattcaactgtccgtgattagaagataacacactggaagtcgcacaccaccataaaactgaagccacacatgcgtacaaatggcgacagtgtctggtgtacagcagcgctctgccttgtccagaatacacacttgaattctttgtcacaattcacttcacgtggcactgcaatagcgtcctctcgctctttgttagttaattttaatggcttttaatttcttcttgctgaactgtttgcaattataatgcaaattatggatactagtccattatttgtggatgtgacatactctgattacccctttccattccattgttgtctacgaagttcacacttgagaatcacatagtcaaattacaaaattacaaaaaaaattgcaaaaaaactcaaaatgttttaagaaagtttccacatttgtattgggatacattcaaagccatcctggactgcatgaggcctgcaggccacaagttggacaagcttgaattaaaccaatagaacaatttgggtataatctatatctttactatgttcagcctttcatcccgtgaatatagtatgcctctccatttctttagcttttattactttcctcaacattttatagttttcagcatagaggtcctgtacatcttttgttagatttacaccagaaatatttcatttttgttggagtaactgtaaatgatactgtttttcttgtattttcagatattgattattgttacatagaaatgtgaataattttgtttgttgatcttgtatcctatagccttgcagaacttacctattcgttctagaaatttttttgtatattccttgacattttatacattgacaattatgtcacctgaaaatagagacaattctattatttcctttccaatctgtatgccttttatttctttttcttgtctagtgtattaagacatcaggtatgctctttagtaagaatgttgagagtgggcattttttagttcttcttgatcttggaaaaaccattcagtccttcatcattaaatgtgatttaactgaatgatttttttacagattgtctttatcaaatgaaggaactgtctctctcttcctagtttattgagattttatcatgacagctggaagtacacattttaaaacaaaacatagttgtggaagataagagaaagttccaagcatgctggcttgatagtccagccccaagttgggaaaagtaattatccctttctttttccttctatttatggaataaaaaattaagagaaaagaattttcaaggaaattgcattattccttcaaaacaggtttctagtctttaagtattacctacttttcaaaaaaaaatcaccacatcatggcatccctttttcaagttgcccatgctgtaggtgtattaaagacagagctggtctgaggcaacatacagtctgcccatctgtcaccaatccttttctactctgcacactcctggggaagggctaggtcttgttcctgtctattccactggaagaacagttccctaccacgtggagcatttgcaattaaaaggagactgagatatagaggcaggagaccacaccagatggctgggtctccccactcccacccccgccccacatacactcagaagaggctaggcatctaggatctccattgagcatcttgaatatggcttgccataatatcatatacagtcaataaatatttgttaaataaggatgcctcttcaatatattttgtgcaaccatgaagatcaccacaactaatgtgagaaaaaatgtttctgttgaactctagtctttaggcccagtgggatttatgaaaagtgccatctctttagctgaggatgaagaatggaagagaatacggtcattgctgtctccaaccttcaccagcggaaaactcaaggaggtatgaaaataagatgagtcttaattagaaatgtaaagaatgaatctggggacaggtagaaagtaagatcacagtccgtttccaaggggtagtccactgagttcgagcttcctaaaaatggtcttttatctttatgtacagaaaagacatcacaaaattcattacaaaatgtcacttactgctccatgctggagaaagccatatccttctgggacttgagtctgcacatttaactacaggtactgatctgttttgtgcttagatgttccccatcattgcccagtatggagatgtattggtgagaaacttgaggcgggaagcagagaaaggcaagcctgtcaccttgaaagagtaagtaggagcacagccatggggttctgagctgtcatgagcccttccagctgcctgccatggagtcgacagtcgcactgttgggttactccagtgaccagacaaaagcagggcagcgctgcaactccaaagagccacctaagagggagtggctcccatgaggcggcaagtcagcaagggaaaagggccttctctcctgtgcacaggagccaggatttacttatctgttaacttgtcaccataaatattctgggagattaaatacatactttagaaattaaaaaaacatgattgtatcaaagttttgagtgtagtggatatggaactgtgggtaagcaagcatttggtacttgttgccttgcattgggtaagatgggaaagttacaatggggaacttggaacaatttcaatcccttcatggtttttctgagaatatcagcaaactatgaactattaaaccttcccactacttccttttcctccaatctcaaaaaagaaagggtgctagaaatgctatgtgtagagcaagcctattatttgctgtctacaatggtatgtgcttcaattatgcaggaacgacaggtgtaatctgagcctgtcctgttcagacttgggacatgtggtcactcagttttgggttctccaaatcaatgttggagagatctattttttttaaccagaacattcttgattgtcacatcttacaaaaatgactctgctctcagcgcaacttcaggtcagaggagctggggatagtggggttttccagagcattagcagggagtgtagagaataaaggatgatatttctaggaactcagaacagggtgttactgttttgtaaagtgttgaagaggaattggctctgggcatagagtctgtagtcagacaacgccacctttcttgaatccactaggaagagttaattattctactcttgttctgctgaagcacagagcttacatatcttatatcatccacactcaacacatgctactgtagttgtctgataatgggtctctgtcttcctatgactgggctccttgacctcagaggtgagtctaactcagcttggtgtctccatcacccccagcatagggccagctccatcactggcaccagataaccaccttctgagggagtagatggaagatgattcagcagatagttctgaaagtctgtggctctttatgtgtcttgactggatatgtgggtttcttgctgcatgtatagtggaaggacggtaagaggtgctgattttaattttccatatctttctccactcagcatctttggggcctacagcatggatgtgattactggcacatcatttggagtgaacatcgactctctcaacaatccacaagacccctttgtggagagcactaagaagttcctaaaatttggtttcttagatccattatttctctcaataagtatgtgggctattatttctttctctctttttaaaaataactgctttcttgacatataattcacatatcgtataattcatccacttaaaaggtacaattccattgtttttaagataatcaaaaatatgtatgaccattactattgtaaactaaaatgtttttgtcaatctagagccctcacacactttagctgtcaacaccccaccacaaaccccactgccctaagcatccaataatcaactttctgcctctatagatttgcctattctggacacttcatagaaataatatcattgatttttctctgttgttttttattctctatttcatgagtttattttagtctgttattttctttcttttgctggctttaggtttcatttgctcttcttcttttagtgttttgtggtgtaaataattataatcaatttgagatattttcttcttttaaatttagatattacagctataaatttccctctgagcactggtttggctacatcctgtgttttggtacatcatgccttctttttgttcatctcaaaacaatttcttgttgcccttttgatttctgctttgactcactggtcacttaaaactgtattgtttaacttccacaaatgtatgagtttcccaaatttctttcccttattgatttctagttttattccatggaagttgatgtacatatgctgtgttaattctatcttgactatcatttcctgaacagcatgattaagttaagcagcagattatggtctacattaatccaaaaactctagtccaatagataaaggctaagaggtcagggaatttaattctattactttggtcactccaaagactcagaaggtgccattgatctcactgctgtagtggtgtttcctatgtatagacctgcccttgctcagtcgccggcctgaaagaagggcaaacatgataaaaggaatgggttccagttgagaatcatgatgttcttattcttattactggtagagaaaattataattgctccaggtaaagtttgcattttcaatgatttccttttgtttgttttgtttttcccacagtactctttccattccttaccccagtttttgaagcattaaatgtctctctgtttccaaaagataccataaattttttaagtaaatctgtaaacagaatgaagaaaagtcgcctcaacgacaaacaaaaggtaaaatctgatggtggttaaatgacgatgtttaggttttgataaatttagattttatacacatgatagagcatgtatctgtatttttaaaaataaagacagagaacttatgtttagaacaagagaagccatttggtagaaataaagaaggagattggggaaggagatgagaatgagtcagagagatagcatttaaaacttgaaatcaggcacaacaattagtatgtcatgatataaacagtattgagataaaattttaccacttctcttccctttaataaattgtcaaaggataaagtttcctgtttgaaaatatattttactggtattgtgctttcctcatatcacagattggtaaagaatcattttaagtccaagactcttattttacatattctgcaattaaaggtcctatgaggctacctgccgactgctgacatgtagtgtgtggtaaatgtgagtgtttcacagcctggagtgaacaggggtcttctctgagaattgaggttgcaaggctggctaactcagctttgccttcacgagccctagaggccagccgaaggatgtctgcaggtcagggagacaggaccaggtaacccagctgtcactgaagattatatagagtttgagaatgttggaatatttgaaaatgctcccccaaaaaagctgctgatgagttctggaaatgtcaggagattaatctatacggacactgctgaagaaaaaggtagaagaataaaagatccagtacttcttcctgggtaagcagttatgaccagagatggaaccggcaactctttggccagaaagctgtatccaaaagacagagaagatgagaaacagggagggcaaaggcgaaaaagcaattggacatgatagctagatttgtttcaggaaaacatcctgctttccaaggatttagatgaatgtttttgttcactggtgactcaggtaacacgtcttcaagaagccatagggaggttgagggagggaagtcaagaagggaggttgaggactgcacttttgatttacttctgacttcacgagtcactttctgccaaagaaatctctccttttgcttctagcaccgactagatttccttcagctgatgattgactcccagaattcgaaagaaactgagtcccacaaaggtaaccaaggagtgcttctgagggctactggcggggacactaagagggagggccttgttctgaaaatgtgcaggaagtattccaggaagatgagaatttttgccacatagcagaacaacacacatttagatgttataaatggtagctggaggcactttccagaagcccacaggtatagccatgttccaggctgaaagggcaaccctaagcaaacctagaatgcttggaggacagtcagtggtttgtggatcacctacatgagatcaaatgccagttctcagcctcctccagatccaccaagtgagaacctctacttggaaatttatatcaaacataccgatcaggaagcacactatcccagtaagggtgattttaactggcagtacttgaaagtgtgttcgcaaggttaatctactgcaaagttttatttttccctttgaaatgcataagtaactaatgggggacacctctgataccatgtaaatctacttcaatcttcagtcttgtatctactagttttatgacccatggatggttttaaccaaaaccattattactaagacagtggcaaaatgataaccatggtcaatttcaagctaccaagatttggcaaccatctcacaaaatttttgaatatttaacaattggttctagagagcaggactcagcagactccagtataccactttaaacatgtccatgtctacatctacttctgtctgtctatctatctgtcaatcatctatctgcctataatttatcaattaatcatctatctatctcaacaaaacttgctgtgataaagaaaatagtctatcatttcactgtttcatatagaaatcactagacacatatggctattgagtactggacatgtggccaatgccactgaagaacaatttttaagagtatttatttttaattgaataaaatttgaatttaaatagccacatgtggatagtggctaccagattggacagcagagctcccaactttaaaattacagttcaatttcaactcagtataatggggttcaatgtaactgagtaaaataattggatggttgaatttacccacagcagcatacagaaatattcactgataaatcagaactctgtagacctttctcacactcattttatattgtgtttggttgtgagttacatgattgctgcaggcaccatatttatttctgtgctccaggtctctaaaggtcctaatccagtcctgaccaaacagactagtgatggaccatcgtgagcttctctcaggagaaatatcaagagggaggccaacctgtaatcataagaacttctgctattttaatgccattcatcagactacagtcaatcaccatgcttctggctttttgtctatctctgctgtcttgtacatcctgagatagtccattctgagaactgtaccctagatcttgtattgcctgatgcctgtcaaagatgtaatccatgctgcttaagtgaggttgtgcacacaaatcaccatatctcctgcaagtttggattttgattcagtagttcgatggtggggtttgagattctgcatttctaataagctcccagatgtggctggtgctgctggtccatgaaacacactttgagtagcaagaggtgatctgtagctcagtattggtcctttaagttccctcaaacatatatagagaaaaggtcctaaatattgcaaattctctcaaagtttgtcaagctatattggaattctctcaaagtctgtcaagctctattgtagaaaatcaaatttttattgggaaaaagcctaccccatatttacttacagataaagtacttttaggatcattcaaggcacacacccataacactgagtatgtaagacagaaatgctctctctggaaattacagcagtgctggtgctgggatgccatgatgaggagtgtgtggcccacaatcatgtagaccttgggaaaacctggattaaaatgattttgcgtcatcctggccctgtataagatacatatcagaatgaaaaccactcccagtgtgactttgaattgcttttccattttttcttcttgggattagagagcttcacttagatttcatctaagctgtgatgttgtacgttgacctgatttacctaaaatgtctttcctctcctttcagctctgtctgatctggagctcgcagcccagtcaataatcttcatttttgctggctatgaaaccaccagcagtgttctttccttcactttatatgaactggccactcaccctgatgtccagcagaaactgcaaaaggagattgatgcagttttgcccaataaggtgaggggatgacccctggagatgaagggaagaggtgaagccttagcaaaaatgcctcctcaccactccccaggagaatttttataaaaagcataatcactgattccttcactgacataatgtaggaagcctctgaggagaaaaacaaagggagaaacatagagaacggttgctactggcagaagcataagatctttgtacaatattgctggccctggttcacctgtttactgttatcacaataatgctaagtaaaaaaaaaaaaaaaaaaaaaaaaaaaaaaaggagtgtggcgagaagatggccaaacaggaacagctccagtctacagctcccagcgtgagcaacacagaagacgaatgatttctgcatttccaactgaggtaccgggtgcatctcaatggggattgttggagagtgggtgcaggacagtgggtgcagtgcacccagcctgagccaaagcagggcgaggcatcacctcacctgggaagtgcaaggggtcagggaattccctttcctaggggtgacggacagcacctggaaaatcaggtcactcccaccctaatactgcgcttttctgatggtcttagcaaacggcacaccaggagattatatcccgcgcatggctcggagggtcctacgcccatggagcctcgctcattgctagcacagcagtctgagatcgaactgcaaggcagcagcaaggctgggggaggggcgcccgccattgctaaggcttgagtaggtaaacaaagctgccaggaagctcaaactgggtgaagcccaccgcagctcaaggaggtctgcctgcctctgtagactccacctctaggggcagagcatagccaaccaaaaggcagcagaaacctctgcagacttaaatgtccctgtctgacagctttgaagagagtagtggttctcccagcacacagctggagatctgagaacagacagactgcctcctcaagtgggtccctgacccccgagcagcctaactgggaggcaccccccagtaggggcagactgacacctcacacggccgggtactcctctgagacaaaacttccagaggaatgatcaggcagcagcatttgcgggtcaccaataccgctgttctgcagcctccactcctgatacccaggcaaacagggtctggagtggacctccggcaaactccaacagacctgcagctgaggatcctgactgtcagaaggaaaactaacaaacagaaaggacatccacaccaaaacccatctgtacatcaccatcatcaaagatcaaaggtagataaaaacacaaagatgggggaaaaacagcagaaaaactgaaaaatctaaaaatcagagcacctctcctcctccaaaggaacgcagctccgcaccagcaacggaaagctggatggagaatgactttgacgagttgagagaagaaggcttcagacgatcaaactactccgagctaaaggaggaagttcgaacccatggcaaagaagttaaaaaccttgaaaaaagattagacaaatggctaactagaataatcaatgcagagaagtccttaaaggacctgatggagctgaagaccatggcacgagaactacgtgatgaatgcacaagcctcagtagccaattcaatcaactggaagaaagggtatcagtgatggaagatcaaatgaatgaaatgaagaaagaagagaagtttagaagaaaaagaataaaaagaaaggaacaaagcctccaagaaatatgggactatgtgaaaagaccaaatctacgtctgattggtgtacctgaaagtgacggggagaatagaacgaagttggaaaacactctgcaggatattatccaggagaacttccccaatctagcaaggcaggccaacattcaaattcaggaaatacagagaacgccacaaagatactcctcgagaagagcaactccaagacacataattgtcagattcaccaaagttgaaatgaaggaaaaaatgttaagggcagccagagagaaaggtcgggttacccacaaacacaaacccatcagactaacagtggatctctcggcagaaactctacaagccagtagagagtgggggccaatattcaacattcttaaagaaaagaattttcaacccagaatttcatttccagccaaactaagcttcataagtgaaggagaaataaaatactttacagacaagcaaatgctgagagattttgtcaccaccaggcctgccctaaaagagctcttgaaggaagcactaaacatggaaaggaacaactggtaccagccactgcaaaaacatgccaaattgtaaagaccatcgaggctaaggagaaactgcatcaactaacgagcaaaataatcagctaacatcataatgacaggatcaaattcacatataaaaatattaaccttaaatgtaaacgggctaaatgctccaattaaaagacacagactggcaaactggatagagtcaagacccatcggtgtgctgtattcaggaaacccatctcacgtgcaaagtaacacataggctcaaaataaagggatggaggaagatctaccaagcaaatggacaacaaaaaaaggcaggggttgcaatcctactctctgataaaacaggctttaaaccaacaaagatcaaaagagacaaagaaggccattacataatggtaaagggatcaattcaacaagaagagctaactatcctaaatatatatgcacccaatacaggagcacccagattcatgaagcaagtctttagagacttacaaagagagttagactcccacacaataataatggaagactttaacaccacactgtcaacactagacagatcaacaggacagaaagttaagaaggatatccaggaattgaactcagctctgcacaaagtggacataatagacatctacagaactctccaccccaaatcaacagaatatacattcttttcagcaccacaccacacctattccaaaattaaccacatagttggaagtaaagcactcctcagcaaatgtaaaagaacagacattataacaaactgtctctcagaccacagtgcaatcaaactagaactcaggattcagaaactcactcaaaaccgctcaactacatggaaactgaacaacctgctcctgaatgactactgggtacataacgaaatgaaggcagaaataaagatgttctttgaaaccaacaagaacaaagacacaacataccagaatctctgggccacattcaaagcaatgtgtagagggaaatttatagcactaaatgcctacaagagaaagcaggaaagatctaacattgacaccctaacatcacaatgaaaagaactagagaagcaggagcaaacacattcaaaagatagcagaaggcaagaaataactaagatcagagcagaactgaaggaaacagagacacaaaaaaacccttcaaaaaaatcaatgaatccaggagctggttttttgaaaagatcaacaaaattgatagaatgctagcaagactaataaagaagaaaagagagaagaatcaaatagatgcaataaaaatgataaaggggatatcaccacccatcccacagaaatacaaactaccatcagagaatactataaacacctctatgcaaataaactagaaaatctagaagaaatggataaattcctcgacacatacactctcccaagactaaaccaggaagaagttgaaactctgaatagaccaataacaggttctgaaattgaggcaataattaatagcttaccaaccaaaaaaagtccaggaccagatggattcaccgccgaattctaccagaggtacaaggaggacctggtaccattctttctgaaactattccaatcaatagaaaaagagggaatcctccctaactcattttatgaggccagcatcatcctgataccaaagcctggcagagacacaaccaaaaaagagaattttagaccaatatccctgatgaacagtgatacaaaaatcctcaataaaatactggcaaaccgaatccagcagcacatcaaaaagcttatccaccatgatcaagtgggcttcatccctgggatgcaaggctggttcaacatacgcaaatcaataaacataatccagcatataaacagaaccaacgacaaaacccacatgattatctcaatagatgcagaaaaggcctttaacaaaattcaacagcccttcatgctaaaaactctgaataaattaggtattgatggaacctatctcaaaataataagagcaaatttatgacaaacccacagccaatatcatactgaatggacaaaaactggaatcattccctttgaaaactggcacaagacagggatgccctctctcaccactcctattcaacatagtgttggaagttctggccagggcaatcaggcaagagaaagaaataaagggtattcaattaggaaaagaggaagtcaaattgtccctgtttgcagatgacatgattgtatatctagaaaaccccatcgtctcagcccaaaatctccttaagctgataaacaacttcagcaaagtatcaggatacaaaatcaatgtgcaaaaatcacaaatattcttatacaccaataacagacaaacagagagccaaatcatgagtgaactcccattcacaattgcttcaaagacaataaaatacctaggaattcaacttacaagggatgtgaaggacctcttcaaggagaattacaaaccactgctcaatgaaataaaagaagatacaaacaaatggaacaacattccatgctcatgggtaggaagaatcaatatcatgaaaatggccatactgcccaaggtaatttatagattcagtgccatcgccatcaagctaccaatgactttcttcacagaactggaaaaaactactttaaagttcatatggaaccaaaaaagagcccgcattgccaagtcaatcctaagccaaaagaacaaagccggaggcatcatgctacctgacttcaaactatactacaaggctacagtaaccaaaacagcatggtactggtaccaaaacagagatattgatcaatggagcagaacagagccctgagaaagaatgccacatatctacaaccatctgatctttgacaaacctgacaaaaacaagcagtggggaaaggattccctatttaataaatggtgctgggaaaactggctagccatatatagaaagctgaaactggatcccttccttacaccttatacaaaaattaattcaagatggattaaagacttacatgttagacctaaaaccataaaaaccctagaagaaaacctaggcaatatcattcaatacagaggcatgggcaaggacttcatgtctaaaacaccaaaagcaatggcaacaaaagccaaaattgacaaatgggatctaatgaaactaaagagcttctgcacagcaaaagaaactaccatcagagtgaacaggcaaccgacagaatgggagaaaatttttgcaacctactcatctgacaaagggctaatatccagaatctacaatgatctcaaacaaatttacaagaaaaaaacacaaccccatcaacaagtgggggaaggatatgaacagacacttctcaaaagacatttatgcagccaatagacacatgaaaaaatgttcatcatcactggccatcaaagaaatgcaaatcaaaaccacaatgagataccatctcacgccagttagaatggcgatcattaaaaagtcaggaaacaacaggtgctggagaggatgtggagaaaacaggaacacttttacactgttggtgggactgtaaactagttcaaccattgtggaagtcagtgtggtgattcctcagggatctagaactagaaataccatttgacccagccatcccattactgggtatatacccaaaggattataaatcatcctgctataaacacacatgcacacttatgtttattgcagcactattcacaatagcaaagacttggaaccaacccaaatgtccaataatgatagactggattaagaaaatgtggcacatatacaccatggaatgctatgcagccataaaaaatgatgagttcatgtcctttgtagagacatggatgaagctggaaaccatcattctcagcaaactatggcaaggacaaaaaaccaaacactgtatgttctcactcgtaggtgggaattgaacaatgagaacacatggacacaggaaggggaatatcacacactggggcctgttttggggtgggaggagtggggagggatagcattaggagatataccgaatgttaaatgacgagttaatgggtgcagcacaccaacatggcataggtatacatatgtaacaaacctgcacgttgtgtacatgtaccctaaaacttaaagtataaaaaaaaaaattcaaaaacctcagtggcatctaatgagaagcatttattgctcacaagactggatagtgagttctgctgatactgactggactcactctggtctggctatggtctgaggtagcctggccctgggggcgcgatggaggctgactcagctctccccacacctgtctcatgttccagtcaggtagccactggccaagaagccaagctaggaaccagggtatctgactcctgagctaaactctaaccctctacaatactgcctcccaaatataacaccaagtgctaggtacatatcatccacagttttcagacttctgcccaaactgggattctttttagtgtgaagagacctggcctgtggggctgaccctggtgtggctgtgaggcagacacaaagggacatttacatccagtcctgaagattacagtccagccctgaagcaacaactaggaaactattccaaaaggaggggatggggctgagtgtggggttctattctcttcataactttaactagaactcaaattgtgtaccttggtagcatccaatcataaatttattttgtcgtatttgtgatagaaaggaacaagtttatccacaaatttatttatttatttatttatttatttatttatttgagacagggtctgactctacgacccaagctggagggcagtggtgcaatctcagctcactgcaaactctgcctcccaggctcaagccatcctcccgcctctgtctcctgagtagctggaactacaggcacacgccaccacacccagctagtttttgtattttttgtagagatgggttttcaccatgtttcccaagctggtctcaaactcctcaaaagagttaccaagcaggactctgcaaccaataatccttgtgtgaagaggatatttgctcttttccctgtttttctttcttggtacagatgtgtgacctctttttgaaaggtgatagtgactttggtgtattttatttggtggtaatggtcatagccccattaatcacatttcttcccatgagaaagaaaaaccactacatggtcatgctaaggatttcagtccctggggtgaggatggtcttgaatatctcctacattcataactcctccacacatctcagtaggtcactgagcacatcaatggacatgccagttattaaaatacttcacgaatactatgatcatttaccagtatgagttattctctggagcttctaatacttcaatagtactgcatggactcagttgagagttaattcaaaatctcagattatccaattctgtttctttccttccaggcaccacctacctatgatgccgtggtacagatggagtaccttgacatggtggtgaatgaaacactcagattattcccagttgctattagacttgagaggacttgcaagaaagatgttgaaatcaatggggtattcattcccaaagggtcaatggtggtgattccaacttatgctcttcaccatgacccaaagtactggacagagcctgaggagttccgccctgaaaggtacaagtctccagggaaatggagctcaccctgacccaggctggttcaagcatattctgcctctcttaatctacatgacaatcgtgtggttgtacaatcatttgcttgtaagtctttttatcacaaaaaagtgataattatcaaactttacaaaccacagactagaaaaaacgaaactacatccatccacagtcccagcacaagacaaagataatcaattatgtccctgtgggcatttttctacgcctatatagatttttaaaaattagaatggtatcactttttatttggtttgaattgctgcttacttgatttaacaggaaactatccactgacctatattactataaatatacatatatatgtatatatataaatatatatatatgtatatattgcatatgccataaaccatttaaccatgatgttatttcaggtgtataggctttttattcctttctgttttttctatgctgtgccctttagctctctgaatttaacagaaactttaaaacatgcttccacattccatttgctttcaacgttacttgctatttcctctgtagtaattataagagtgcaggctgaggtcctgagaagtcctcatccctaatggtttaagccacttcactgaagacacaagacagcacaggtcctcctggtcctatctgtggctgcagtcctgtgccagctcccttatactctcagtagacatctcacacactcctccttggaggtgtcttgagcatgctcttctgggaattcagggacaaggtcaggccttaggcacagttcgcactctggatatagttggtgttttcccattactgtattattaagcaaaatttagaatgaaatttttagggtactggctggtgattcaggatgcttgggatctagactttcattagcccctacctgcaagtttgctgatgggaggaaccttgtcttgttggtcatggtgtccctagtgctagcatggagtctgcacataatacttgttcacagagtaagtcagagctgaccaagttctctgttttctggagtagaggacttctatgtttcctgcaagctcagcacttccacctcctgtggctgcactaatacgaaatcagagaccactcgctgtacttcactttgaatcactcagtcaccaaaaagatagtgcttgccatgtgtcaggaacttggctaggcagggagaaattcatatgatttatataaatccataaatccatatgatttacataaatccataaattcatgtgatatatacgtatatgtgtgtgtatatatatattagagaatgtttgacatatacacaagtacatgttaccgacaccagcctatagaatagttttcgtgcatctccatatatctatcactggttccaacagccatcaatccatgttagctgccccatccaaatgccaccatcaccctcctcctgactatcatgttattttgaagcaatagcctgtaaatatttcagaatgctctccaaaatataaagactcctgtaaaaacatatgacaacaatgccattattactttctttgaatcaacattttttccttaatataatcaaatatttagaaatcaaatttgaataaaacatgggtcaatcttcaaagaatttatagcttaatggaacagatcaaggaaagcagggatgacactacagtagggtagcatcatatgcccatgtaacttatgtgacttaaactatcctgtaagggtgtgggggagaaagagaggaagagatggagagaagaaaaaggaagagaaggaggaggagaaggaggcagaggagaaggtggacggggaaggtagagaggaggaggaggggaattagaaaaaaagagatgacaggagaaggaaagggaaaaataacaacttgaaatagcacaagacgttttctccttctcctttctcaatgagcatgtgaccaacacaagtgtgagttgaggcaggaatccacttttccatccatcagtcttatcatttatgtgccttttatagtgtgaacacatcaccaccctgaatataattttagtgtttagagataaatattatttgcaacaatattcatctcatctcaagaaacgctcctatagggtatggagaatttaaaggacctgtaggttatgatgattataacgaaataaccaaagcaggatttcaatgaccagcccacaaaagtatcctgtgtactactggttgggaggtggaggggggttgttcttaagtaagaacccctaacatgtaactctgtggtttttatgtttcattaactatttaatctaccaatatggaactaggttcagtaagaagaaggacagcatagatccttacatatacacaccctttggaactggacccagaaactgcattggcatgaggtttgctctcatgaacatgaaacttgctctaatcagagtccttcagaacttctccttcaaaccttgtaaagaaacacaggtcagtacactttctgtatgttttattaagaatttttttaactgaagggtatatattttttaaaagaatatgcatgtttatcttttaataattcattctatgggccaaagaacctacttggatccatctttgatcattaaggatgcttcagttctggacttcaaaacctgtagcattaagaacatcatgtaaagtccacacagattagcatgacatgattatgtgtagtctctttgaacctgagtaagtttaaattcagtttcaagtcaattggaaagaagtgttttgcacaatcatgaagtgcaatgattacctggctgtgacttaaatggtgttctccatcaccagaacctgcagaagctctctcatgacagtggttctcaaccactagctgtatattggaatcaccagggagcttcaaaaattcatgatgcctgtgacatctcagaaattctaaactaattaacccagagcgtgactaggttctgtcatgctgtcgggtgaacccctgattagttctcacgtgaagccaaggtggagaatgactaatttcaggcatttctggtggatatgaaggactaccatagagcagggctatccttactccttgaccttatgttccaggtgatacatttaaagaaagatttagaatcttttctctgaagaagttaaagaacagatgtcattgattcatattaagcaatagcctataagtcttatttccaggaccggtgtatttaatatgcaactctaccccttaagtacactttgtgcttgggagaggaggaggatggagatggttgccatcttatctatggcttcagggcagctgtgtagctttcctatgtgtgtattcaggcagggggctcagccctgagagaaagtgggcctctggcacacctgggacagggaagatattccctggcaagctctcaggcatctcaggctggcacttctttgtatccatggcaatttgctttcccctcactgaactgagatcagaatgttactctgttggtggctcccccaacagtgaaggggtgactcagtgacaatagtgctagaagtatgagtcaaaacactgtacaacttgagaaattccccgtttgcactacgcttggaagccaagaggagatgttaaaaagaaaagaataattctttctgaagacatttcccatcattgcacttgatgggttcaactgggaagggttactagactctggaagttgaaaactgcccacataattaaactgtacaacagctactcaggattaccttgcaagttttaacctataaaaatttaactttatatagcacttccaaaatagtttgccataatacctactaatctggatttaatttttaaaactcatccttttaacttaagatttaaataaaaaaaaaaaaacacgagtccacaagaatttgtctcaggcctggcacagagtcagtgctccataaatattttgttaaacgatggatggtgagtgcttttactatccagtatttacccagcttatagattaagtatgaagagttcaagatacatggtgttaagagtcgtttttatatgcttgcaaagcatttttgtcatattttttctactttgcttccatcttttcttctttcacttcatttattaattctccatatgcttgtttaactattgtagatccccttgaaattagacacgcaaggacttcttcaaccagaaaaacccattgttctaaaggtggattcaagagatggaaccctaagtggagaatgagttattctaaggatttctactttggtcttcaagaaagctgtgccccagaacaccagagatttcaacttagtcaataaaaccttgaaataaagatgggcttaatctaatgtactgcatgagtagttggtgattttgtacattcattgagctctcccagagtctgtgtagagtgttgtgcattatgtagtataaaggaggtgaccaggtaagtgacagataggtagactcagcttctctgcttctcataggactacctctacccacctctagttagcattatcaactcctcctgagctctcatcagagaataaatatttctcaacaatttgatccataacttttaagaaaaataagaattatcatgatgactctaatagtgacatttatatcacgttttatttgtaatattctataagttttatattaagcgaagtgataaaatcccctttacaaaaatattatctgatgccatcctgcacactaaagagaaatctatagaactgaatgactgaaaaccagcaaataaacattttttatcattgtaatcactgttggtgtggggcctttgtcagaattccaatttgattattaacataggtgagagttaatctgctgtgactttgcccattgtttggagaaaatattcatagtttcattctgccttctttgaagaacatattttttgtaacactcaacgaagcacttatcatattattagttatgatttattatttttaccacatctcccctgacatttctggaacacaggaaacatgttttcttatacgtcttgcattccatcttcacctcccaattgtcttaatgcaatgaacactgaataaaaaattgtcaattcgtcagttgattgggcagcatgtctaaaagcactattcattttccttttttattctttcattttccctccttttctgaatactaaagccattaggtgggttgcagccatgtggtagccacacattaaggtggacaagagagtcatggtggctccaagtcagattccaagtgtgctggggaaggcatccacatggaggggcagcctgacctggaagcgggagcccaagcaatcagagaaggggtccacacagaggtgtggccttcaagagcagccagagcctaaatagggcctggagaacccacgtgaggtgaggagggtatccctgagtgggaagggatgggtgagagttggctacatagaagggattgatcacataagtaaataaagtatactggaagctaggtgtgtcacttttgcagaaaagagtcatagattcagaaagggagaaagctagcattaatcctatggtgttagattggaatggatgtatcagtgtacattcatacttttctagatagatagatggatagatagacagatgatagatagataatagatagttgatagataattagatgtaaatatatgtgtttgtatgtgtgagcatgcatgtgtgtgtgtgtgtgtgtgtgtgtgtgtgtgtgtgtgtgtataaaacatatattccctacttcactgatagggctagataacaatgacatttcaatagcaatgagtatacttagtgcctagatcttggcttatgaatatcattttccactgaagggaaccagagctcgttagagaaatagctgatgccagggctaggactaaaaatgttcaagatgagcccaggacactttttgtgccaggaagtaagaaaacactcaaatggtttctaaatggtatttggaaatgatttctaaatgatatttccatatgacttccaaatgatattttaaaaacctaaagactccaccaaagaactattagaactgataaacaaattcagtaaatttgcaggatacaaaatcaacgtacaaaattggtagcacttctatatgccagcaaggaacaatctgaaataaaatcaatagccacaaataaaattaaatacctaggaattaacttaatcaaagaagtgaaagatctctacaatgaaaactataaaacaccgatgaaagaaattgaagaggacacaaaaacatagaaagatattccatgtttatatatttcaagaatcaatattgttaaaaatgcccacaatacccaaagcaatatatggattcaatgcaatccctatcaaaataccaatgacattcttcacagaaatatttttttaatcctaaaatttgtatggattcacaaaagaccaagaagagccaaagctaacatcagcaaaaagaacaaaactggaggaaacacatttacctgacttcaaagtatactacagagctatagtaaccaaaacagcctggtactggtataaaaacagacacatagaccaatggaacagaatagagaccccagtaacaaatctacacatctacagtgaactcatttttgacaaaggtgccaagaacacagactggggaaaagaaatgcaaactatacatccaacaaaggtctaatagccaacatctataaagaacttaaatgtacaagaaaaaaaaattaaaaaatgggcaatggacatgaacagacatttttcaaaagaagacatacatgtggacgacaatcatataaaaaaaaagcttaacatcactgattactagagaagtgcaaatcaaaaccacaataagataccatctaacaccagtcagaatggctattaataaagagtcaaaaaataacaggtgtggcaaggttgtggagaaaaataaacacttatacactgtcggtgggagtgtgaattagttcaaccattatggaaaatagtgtggcaattcctcaaagatctaaagacagaaataccatttggcccagcaatcccattactgggtatatatccagaggaatataaatcataaagacacatgcacacatatgttcactgcagtactactcacaatagcaaagatatgaaattaacctaaacacccatcaattacggactgaataaagaaaatgtggtacatatacaccatgggatactatgcagccataaaaaggaacgagatcagctgagcatagtggctcacgcctgtaatcccagcactttcagaagccgaggtgggcagataacgaggtcaggagatcgagactatcctggccaacatggtgaaaccccatctctactaaaaatacaaaaattagctgcatgtggtggcactcacctgtaatctcagctactcgggaggctgaggcacgagaatcgcttgaacccaggaggcggaggttgcagtgagccaagatcgcgccattgcactccagcctggcaacagagtgagaccatccccacattctgaagtgaacctagctctggggccaggcttgatcgtcctcctcaaagccatcctgctcctgctgggtgggcttctgtggctccaggcacttgcatcaggagtgtctgcagtgaaggtctcacgtctgaccctcctgacctcctgagctgacctcaacctgtcccactatgtgttctcttttttcaaaaaaagaaaggtctgttacatacatggaaaggaaagaaaggagaccagatctggcattgcttttctgtgagtgaagaacatgcaggaaatcggctatcataatccctaggaatgtgcttctccactcattgacttgggaaaggaaacaaatgaagaaaggcctcataaaaatgagttcatgtgggaggaattatatgcagcttcctatcaattacagtaataggctgcaaagggcgtggcggaggaaaaagaattactcagagggtcacaacaactgccttctagtccaagtccctctcatttaccaaagacaccatgcttttagtccccctcatgctgttcaggcagcccaacttgcccatttctatctacaaaattccacttgtccttcaaggctcagatcaaatatcatgttcttcatgaagcctccagtgccctaggccaggagagggtcttctttcccctccagagttctccagaatgcaaattctgtgacagtccttttcatgctctgcttggcatcagtcaagtgcaccccaaatgctaccccaaacaggactgtttgttcttaagttgtataaaagatcctgtttatccaaataaccccatccacagaagaatctatcacagcacctggtgtaaaacaatgactcagtacaagtgtgctgctatagctaatgatggtgacggtgacaatgatgacaaggacgatgacagcaaacactggagaaagaacactgatgaccatctccaagagattttgccttaacccattccctttgtctccttgatcctgatcccatccaaagaaaaagaattaagtgtgtgcttgtcagagccccaggatctcactggcccctattttatgaagggtggtgtgcctcacagggtcagcatctgagatgaagcttccttcctttttgcctggccctgaacagtcttctgcttgtgcatctcttggaattcccatttggtctccaatctccctcctgcacagtgtgcctgaacccacaggtcttcaactcagatgtggggctgagaggggggagcaatgcaagcctacacgatctcacaactcccttccccagtgacctctatgatgcaggttactgggtgcagctcagatactactacagtgggactgagagccccatctgctgttgctccttgggccatcggggttgggatgattggcagggcaagaatcagcctttcctgggtctctggccataaaaccacaaaaaactcaacagaatctcacctcaagactgtgaaaatgacatgaagagttgacatcactatgaagaaatgttcaatatgcatttgctgtaatggtgaagaatataatgatttggccccatggaaaaaaaaatgaacatgaaaaaaaaagggggggcagcaatgggtaaacatgaaagaccttcacctaaccttgctctatgctggtttgtaaggagactttccggctcacaggcttctaaagtccaatggagtacatagggtaagatgattcttctcttatggcaaacgcctttctagatgggcaccggtcttggcctgcaggctgcttgcttaggggtatggggagagaaacattccctttctcatcctgcacataatgcaaccataaaaggttcagaagcttagtcactcttacagacttggaagtgtaaactcgatcctataaacaccagaatttttatttctacttcaaaaataaattgcttttttgaaaaaaagaaaaaataacttcattacctacattaaaaaatcattattaaggaccactaatggggaagtaaaagtatcctcaagaataatgagaataataataatatctcctatgtggtcctttccaagttccacaatactttcacgcccatactgtctctgttcaacttggatgccttcttcacatcacagaccacaggtacatccatttaacaaaacaatctgagcttgagtgactagtatgtaccaagcaccattctaggtagtgggggaaatatcagcaaaaaaagcaaagtttctactttcacacagctgaagttccagggcatgtggtagaacaggaaacaaaaacaaatttataatacgtcagataatggtaagggctacaaagaaaaataaatctacgtaagaaaatagagactgatggggagtgctactgtagaagggttgtgttccaattatctattgctatgtaattaaaccactcatacttagtggctaaaaacaatagcatgcatttattttcgttcatatttctgggggtgactaggctgagcttggcagtttccctgtagggtctctcacatggttccagtcaaacagggactggagctggagtcatctggagggttccttctcacctgactgatggttggtgctaggtgtccactatgaccacagtgaggactattgctggaatacctctgtgcagcctgtcaatgtggtggaggttcctcccagcattgcagctctgttccaagggcaagcatcccacctatcacctcttatgactaagcatcactgccttcacatttaatttgttagaagtgagtcactttggtcagtttcaagaggagaggaactggactctaactcttggtgaaaagagtgtcaaagaatttgcagatatgttttaaaaacatgacagatagttagagaaggtctctcaaaacaggaactcacatgaagagaaggagaaagttgtgtaaagggcttgagaaagtagcttctaggcaaggagaacaacaggagctgaaaacaaaactgggagcgtgcctggcatgatcaggaagaactgtcaggtatgaaaggactttgttattctgagaggagaaacctttggaaagttccaaacaacatgtaaaatcatcttagctatatttttaaaagattatctggttcttggatagagaagagagtatgcagaggaaagagtagaagcagggagacagctgacaaagtctagggagaagatggtggattggacctgaagccttggagggagtgggagttgtccgtctctgtcaatattttgaaagtagggccaacaggatttgctgatggcttagatgtagggtataagagagtgacatctaggctttttggactgagcaactggggcattagagggtccattcattaagatgaggaagaattaggtttggatggtgggaggagaatgaagagtttggttttgtggtggtaagtttgagatgcctacttgatctttaagtaggtagttgtgaatatgagttagaactcaagggagaaatctacaaccccctggaatcaaatagctcctggaggtaggagtcaaggatgggaggtgatatggtttggctgtgtccccacccaaatctcatcttgaattatagtttccataatccccacatgttgtaggagggacccgaaggaaggtaattgaatcatgggggtggttacccgcatgctgttctcatgatagtgagttctcacaagatctgattgttttgtaaggggcttatccccctttgttcagcacttcttcctgctgccatatgaagaaggacatgtttgcatccccttcaaccatgattgtaagtttcctgaggcctccctatccctgaggaactgagtcaattaaacctctctcctttataaattacccagtcttaggcagctctttatagcagcacgagaacagactaatacaggaggtaaacgaagattctaccacctctctcctcccaatctctatctaaaagctctcctaccaccttctgaagagactgcactttttgactaggaagggaaaacatgaagctcttgggtttgctaccatttcctggtctctggccactcagatgatagaacagagctacggctagtgtatgtggcagcaaaactatttgctcttcctgaaagccaaactgctcctcccaagtcgctctgcttctcagggcacaacacatatactactcatgcatttccatcctccctctcccattagtttaaattctcagtgacaaagaatattgcctgttttcccggcttcatagccaatttttatggagtttttttatcaaaacatattgatcctgggaatgcgttggacaagatggctctctggaagtatatccttccctgagatcttacagaaaacaggcaggacaggaattcaaaattgtgagaggcccaagtgaatttatttggcttggagaatttctggcaagtgaattcagtataattgcaattggtggctcaacaaacagctagagatcattgcctatgatgggagaagcaagatttgctgatggtttggatgtggggtatgagagcaggaatcatatcattcattaaaataagggagaggccaggtgcggtggctcacgcctgtaatcccagcactttgggagggcaaggcggatggatcacctgagctcaggagttcaagaccagcctgaccaacatggtgaaaccccgtctctactaaaaataccaaaaattagccaggctacggcaggcgcctgtaatcccagctactctgggggctgagacaggagaactgcttgaacctgggaggcggaggttgcagtaagccaagatcgcaccattgcactccagcctgggcaacaagagcaaaactccatctcaatcaatcaataaaggagaaatagattttgagggtgggaagaaaacgaagagtttggtttagtgtgtgatgtatgagatgcctatttgacctttaagtagtttttgtttgagacagtgtcttgctctgtcaccttggctgaagtgtagtgacacaatcttggctcactgcagccttgacctcctgggctcaagcaatcctcccacctcaacctcttgagtagctgggactacagacgcatgccactatgctcagctaatttttcaactttttgtagagatgggggtctcattatgttgcccaggctggtcttgagctcctgggctcaagtgatcctcccacctcagcctcccaaagtgctggtattacagacgcgagctactgcacccagcctaagtaagttatgagttagaattcacaggagaaatctacaacccactggaatctggctttcccccactatgccactgaaactgctctcaccatagtgccttctaattgctgaaacaggtagaaatccaggtctttcattcaaatatttactgtctcctattatggagtaaagagcctgtaattggctgcaatgcccttaagtggcccttgctaagggaaggttagtctacacccaagcagaggctctttgtgatgcagaggcattggggcagggacctacctgacaggaaccaaaagcagcagtgctggagccagggtgcctccacagggaccacctagtttgcttgatacagaattgcaggcccctgccctgagattagacttcaacagctcttgactctgcttgacaatactacctttacccccaagtgatctctagtaaaactcctttgttttctaggaactaggtggagactttaaactctgcaggaaacaggtccagtccatggagttccagtccttctctcaatagctaaaatatctaattgacatattatcctgaatgctaagaacagtgattctcagctaaagtcgattctgcctcccccaggggacgtccaactatttgctcttcctgaaagccaaattgttcctccagaaacatctttgattgttacagccggcaggtgctactggcatctggtaggttgaggccaggattgctgctaaatatcctacaatgcataaaacaaccaggacagccgggccgtgcctcagcaggacggcggctcccagcgcagactccggccccaggtggcagcggcgactggaggaatcaagttgtgcggtcggtgatgcccgagtgagcgacaggcctgggcctctgcccttaggagacaactcccaggcaggccgcaaaggctgggagccttcgtttcagtttcgcagcggcggcggcgttgttggctgaggggacccaggacacctgaatgcccctggccccagcttctctgacgcgatggggaaagtgctatgcaaaatcttcgggaacaaggaaatgtggatcctcatgttgcgcctggatgcggccggcaagacaacaatcctgtaaatgttgaagctgggccagtcggtgaccacaattcccactgtgggtttcaacgtggagacagtgacttacaaaaatgtcaagttcaacatatgggatgtgggtggccaggacaagatccgcgctctcgcggcataactacactgggacccaaggtctgatcttcgtagtggactgtgccgactgccaccgcaccgatgaggcttgccaggagctgcaccacattatcaatgaccgggagatgagggatgccataatcctcatcttcaccaacaagcaggacctgcccgatgccatgaaaccccacaagatccaggagaaactgggcctgacctggattcaggacaggaactggtatgggcagccctcctgtgccacctcaggggacggactctgtgaggggctcacatggttaacctctaactacaaatcttaatgagcattctccacccatcccctggaaggagagaaatcaaaaacccattcacaggattatcgccaccatctcctctttcaattgccacttttcttttgaatttgaactctggagttactgttctacagtttggggggagagggcttgggggtcttctgtttcccgttctttttcctttttcggctttgcgttaggatgctctgagatttgacatgaacacaaagttgctagatgctcttgttgacttccagcagatgggatgggggatatacagcagttcttggtaaagtcctttgtaataattgattttttttatttcgagagaatctttcattttcctgtgtatgcttttttccttttttgtccagtttccttatcacttgctgtagatggcttattttgcattcatgcagactatgttgcaagtctgtttcatctagtaaactgaaaattattgcttaatcaaactgtcatttgtcttttatatttaaggcctttcccccctttcttatgagttctaacttagtaatttcaaatgtgaccttttatatctaagaccagtatagtaaacttagcccacagtggcaaatgatgagtaatatcattgtaatatgttccagttgcacctcagtatgttaaacaggtaatgtaagaagttctctgaaatgtcagcaaataagttctgaaacatacatcatgcacgagcaggaataaaacccaagttccccataacgtagctaacttaacactgcataaaaatatgaaagtgtaacccatgaaggacacactttttttttccactgcaaagtagtcactttgctgtttttcctcttttttaaactttaaaaaaacactcttcccagaaattggagcaataatggggtacaccacacatagattaaatatttgtagatattttaagtgacttttgggcaaaactagaatgtatacttttaccttgttacaaacgcctaagaccagtaatttaaaaattactaacaggtttactttgttcattaataaagcatgtaaccattcaaattatatgcaccttttacctagttgaaaaaaatacacattcctgttttcacattatagcaactgattaagctgaagctataagtcattttttatagatgtgtgatccacacctccatcaattagaacactgaaaaatatgttttataaaaaaggtatttaattttgtttgtaggattaactcatgcaaataataaaaaagataccctgttggttcaatagtacactgtctcctttaaggaaggaagcatgatgaatgaatgatgtgtagacttgagggatggactattaaagtggatggaggatgaggacaaagaacctacagattacaatgaatgtaaacttaatttttcttcatgtgtaagcagtgtgctcgctgatgatatctagatcctaacaagattacttggttagctggctaggaccagtaactggattgcaaccactatgataatattttgaaccaaatgttaatgcttgatgcagaattgtaaagcagcatctggctcctatatagccttaaggaataattttagtgatcctcaaggaattaaatagggaatttaagaaatgtagactgcaaaggcagtatacaggaaaaggtggagtgggttttgtttatgagtgtgtctgaaaactaaaattaagcgggacatcttggtatagttggacagtattggtccttcacgctttggccatattgtataatggagcttttaccaaagacgtatgagaagtgtaagactataaaaaaaatgaactatttaaagtaaaactcttgacaaacattttacttaaagcagatgcaaaaggttattctcatgtaggctcctgttggtgcagagggatttttgatttcaagatgcaactaaagtacgaagttctcagtttcactttagtagaaatagttctagaaataaggctaataaacacatctaagaacactggttgctttctaaaattcccaaagttccaccataaatgtaatccttagtgttttaaatgattgcattttaaggtatataaatatgggttatccaacatcaatgctatagtaacatcctgaaacaaaacaagcacaaaggtataaatgcctaaaccggaggaaacttgaaaccctcatgttaaatcttttttttttttttttttttttttgagatggagtctcgctctgttgcccaggctggagtgcagtggcgcgatctccactcactgcaagctctgcctcccgggttcacgccattctcctgcctcagcctcccaagtagttgggactacaggggcccgccaccacgcccggctaattttttgtatttttagcagacacggggtttcaccatgttatccaggatggtctcgatctcctgacctcgtgatccgcccgcctcagcctcccaaagtgctgggattacaggcatgagccaccgcgcccagcccatgttatatcttcaatgtagtatttctaacttgtgaagacagattggtaggcagccacttttttgtgtcttaaaataactgggagcatagttaaaattttatacatcaagtgattgctattattgaatgttgcaggtgagatgtggttatttttagtttatttgaaatgtctgactggaaatgggggagggggaaggaaatatttgaaatttggaaaactctaaaccttttggtaagaaattgtaattttcacttaaaattttctttaaggatataagaggtttataattgatgtagttaaattgaacaataatcattggtgactggagcaggtaattatagcctgcagaaaaaaattataatctaagaattgaaaaaataagatcctgaagttgtttaattgcatcagtttctgtatttatgtgaatttataaactgcagtatgttttgaatgaggttaatcttgtttaatataagtaaatgagtctgtagactatgatcgccccaaactaaaaagtacagtacctgaaactgtgttctttatggttgtagtgttagtaaagcactaatatgcagaaaataaaggaattacacagtgaaaaaaaaaaaaaccaaccaggacagctgccaacagagaattatctggcacaaaatgttaacagtgcaggggttgagaaaccctggcaaagtttaagagcaagtacctgctacagaaacatgttgctacctgtcattttccctgtctcagaagtggattaagtcaatctgtactgtacagagggaggggacttgaaaccagcttattattattattattactattgagacagagtctcgctctgtcacccaggctggagtgcagtggcatgatctcggctcactgcaacctccgccccccgggttcaagtgattctcctgcctcaggcgcctgccaccacgcttggctaattttgttttgttttgtttttgagacggagtctcactctgtcccccaggctgcagtgcagtggtgcgatctcggctcactgcaagctccgcctcccgggttcacaccattctcctgcctcaggctcccaagtagctaggactacaggtgcccaccaccatgcccagctaattttgtttttttatatatttttagtagagatggggtttcactgtgttaaccaggatggtctcaatctcctgaccttgtgatccacctgcctcggactcccaaagtgctgggattacaggcgtgagccaccgcgcctggccaaatttttgcatttttaataaagacaaggtctcaccatgttgtccaggctggtctcgaactcctggcttcaggtgatccgcccgcctcggcctcccaaagagctgggattacaggcgtgagccaccgcacctggctgaaaccagcttattttttaagaaacaaaggttctccttgcctctcagctgggataaaacaggtactgaaagtattttaagcataatcagcctgcagacaacacccatagcacacactatgacatggaccaaactttcttgatgaaatatttccccaggacagaccttaggcagttacctggttctaccaccacccaggggagaaaacagagtttctcttgcaaaggacaacagcctccctcattacccagcagcacggcacatgcagccagacactgaaggtgtacagcatcatcacaatgtgaggcaaccacagatgccttgtcatacaaaaggaggcccatctatgagttgaccaaatacccgtttgacctggagagtcccggtttacaccactgtcccagcataataaatagcacccactttcactctcaaaaggggcaggaaatacggaacatttgcctggaacatcttgtcatgccagaaagcaaagaagctgtcaatgagaattagggttatgtcaaaaggattcaggagccaaggtccaggggcctccactggtcaaaggtgaaataatttgagcatcaaattataactccagcagactgatcaataccaagtatgtttaaatccatgagtgcaggccaggtgcagtggcccacacctgtaatctcaatactttgcaaggccaaggaaggggtagcaccttagcctggcagtttgaggctgcagtgaactacaattgcaccactgcattccagcctgggtgacagagcaagactctgtctcaaaaaaaccaataaaagcaaaaagctatgaatgcattgatttctacagacttgactgcctttacaggaagcaaaaagtaactagctcattattctgaaaacaggcaaataaagaggaggatcaagcattttcttgccttccctgtatgaactatatctaagggtaacctaagttaatgaagggaaatttcttacaatattccaactactaaatgatgaagcatttacagaactaacgaaagaagcagatctaggcttctaaaatcatatgaagagaaacagggcatgtcacaatctataatgtgttcttgccaaaatgtgaaatatgaatctgattacaccactaaacacttctacatttttagataatacagaaggcagggaaatatgttaaatcacgccatgggtatgcaaacagaaaatgcagaatgattagctgggcatggtggcacatgcctgtaatcccagctacttgggaggctgaggcaggagaatcgcttgaacccgggacagggaggttgcggtgagctgagactgtgccactgcactccagcctgggcaacagagcgagactccagctcaaaaaaaaaaaaaacaacagaaaatgcagaatgtaaaaaactctccaggataaatgatcgagttttttaaaatgaataaatctcaagaagaaaaggataagtactacagattataagccttaagagacaaagcaacaaattatattatattgaaaaattaggtgggttcttaaaattcactggatattttgacattaaggaactgttttgttttgagacagggtcttgctctgtctcccaggctggagtgcaatggcacaatcagggctcactgcaacctcaacctcttggggtcaagtgatgcccagcctcagcctcctgaatagctgggaccacaggcatgcaccacccatgcccagttaatatttgtttgtagatgaggtctcactatgttgctcaggctggtctcgaactcctctcaagcaatcccaccttggcctcccaaagtggtgggatcacaggtgtaagccaccacacccagccgcccttaccttttacaggtacacactgaaatggttataaacaacacttgggatacacttcgaaacttcagtgggggaggaagacggggaggaaggagtggacagagatgaaacaagattgattatgagtttataataaagtcaaatgataaatacataaggatttatttatataggtttgaaattatctattataaaaaaatttctaaagaatagaaaaatacagaaaacaaaatatttcttaacatttgaatagatatgaaaaatcagactaccacaatcccatgggaaaaaccccctacttagaggcttttctgagacactgtcctaagctcttggccccacaggagatagggaagaggccagataggaaagtcagcaaggcccagctccttctgaagcttaagatatgccaacttgctgaaacccagaggaatgctggctgtgtatgacaaaagagcatctgtgattcaggtaatgacaagcagccccccgaggcctccccagtccccacctgcctttggaaaaccaccctctggggaaggccacactcaggccagaagcctcccactgagtctgcctggctgtcagccctgcctagctgctctgataattacgggggaaaaaaagctgattttgcatgtggacctcagtattacagaggagcagcagcagccccgtgtggacatctcagatacatttacgacccagtcagtgcagcctcgtgggcacagctaatgagccaggaagaccaaggagcgtcatttgctaagccaaaattagacaccatgctgcctaacaagaacaggtgataaaaccacgtttcaaagtgggctgagtaatacagctttgtgttagtcattaccatttaccttatttacaatggaaaatgaaaaaaaaaaatctcagtaaaagaatctggtattaagaggcatcagaagacaaaccacattttgcaattataggacactatcaacaaaggacaaactcactcactcagccagggttcaaaggcacagcacaatgacacagcagtcagtccacgctagttatgcagcttccagaactttaaacagaaatgaaacccttaagtgatggcacaataaggaagcttcaacagtttacaaatattgcatcttctcatttttaaagaaatgtatttttttttaatgcctacaaatatctttatttttcctgacttggcactcatgcaaaacaggtcgctaccagctcatcatccccagtgggtgtccaggacccctagtgccttggatgacaagggtctggagggcagagaccatttagtaacaagaggtaggtgacaaatgcatttcagggcaagatgctgacaaagcaatgaatacaggcccagaggatttgcaggaatatccacgggttctgaagatcaggtacatccacgagacataagctctacgaggtcaacagcttctccccctattttattcatggatgtgtctcaagcacccagaagagttcctgacatgtttgttacagggcctcaataaatacttgggaaatgggtccaatgagaatggggtgaaattaattttatgaactataaagtgccatcaaatatagggcattaatactagagttcatctttcagactcattttaattataacagttctttctagagaactgttttttaaaatactctgatgtttattcagtgatcaatagcaaaatactaacttcctaatagttggtgtgttgacagttgttatagtgcaaggaataatggacggggaagttttacagatgaggatagaatgttatagcctgacacagatgaggctccaaataatgtaaaattcacacagttgcctgggagcagatcccagctggggagggaagatccagcacggggcaggagggcaggagtggtcatgggaagatgttctcacgggcacacagcacagataccctgagaatgcctcgggtcatgggctgtcgcatgcatccccaacgcacaacccccagaggcatcacgtctagtctctcattcaccacggcattcccacggccaggtgctcagaggatgttcaataaatgtttgttcaatggaaaagagagggggtgggggaagagtctgagctatgaccctgcaggcaagacagagccctcaggaagatgaggtcccagctaccaacacgtgtcaaggttttgcctttactcccagctttgttcggcagggggacacagacagtccactgaaggagaaaatctcagcctgaactgaaccgcaggagactgcttccctcaaacattggaagaaaaattgtttagcaccacttgggtaagagatggaagcagctatgctctctggaagctctaagtaagccaggccttgcctttcccgcgttggcgaatgggtgggaaggcgatgggaccagtgctttcctgcagccatcaccttgcaccccgcaaggccctgcagtgagaaagatgaatgatggtgctgcctgccacctgctatgctcactgcaccagcggctcctggcggtgctgggtcttctggtgccggttgaggatggacctctggttgaagcttcgcccgcaggcaggacagtggtagggcttctcccctgtatggattctctggtgtcggaccagccgctcccctttgctgaaccgcttcccgcacacctggcacccatatggcttctcgccagtgtgggcacgccggtgcaccgccagattggcattcctgctgaagctcttgccacactcgcaggtgtagggcttctccccggtgtgcgtcctccggtgcacctgcaggtgctgcctgcggctgaagctcttccagcagtccccgcacttgtagggcttctccccagtgtggctgcgctggtgcacctccaggtggtgtctctggctgaaggttttccagcactcgctgcacacgtagggcctctttcccaggtgggttctctggtgcttcatcaggtattctctcagggtaaagcccttcccacactccacacagccataagacttctcttcgtgggttcgctggtgcctgacgagattggagctccgactgaatcctttcccacactcagggcactggaaaggcttccagaaggagctgtgggttttgacttcgtcaggcagggggatggcaccgtgctggggaggaggaagcccaggcgcactgcctgcagggccaccaggctcctgctcacagacccttccgagcccagggccctggagagaggcttccccaaacctctctgatgtcagtgccaccagcgcccctttcaggtcttcctgtgggggttttgcctccttttccttgctcccaccgcctacaggacaggaggagataaagattgattctgtggtagccgcaggacatttacatgttagaactctgcttcacaggggtcccattcatggttccttctcttttttcctttgaccaacaacctcaactcaggctttccttacttctttttccttatttccacctccatgtctttttacagaatagtctgccaaattccagtgcccgcccacttatcttgctgctaatctagacctttacttcttacaaaatgtagctcaataatttcctctaagacactcaccacgattattctcttactctgggcctcttcagcactgtgcacctaactagcactttattattctgtacctatttacatgtgactttgttggaaatgctgtttccattcatccagatgtcctgcgccttccccaaacgattctacacctgctgtagcacagggcagcacacagctctccagaccttccaggtgcctgctcagtcccctgtcctgcccacatgctccctctgcctaaccaggttcattcatctgggtctcctaggagcctggcaggggactgactcagggaagatgcttgctaactgctggctgaatgaatgaagcaggcttcactgaggctcctgcaggagaacgcccctaggtagcatatttatcaggactgagaccatgacgctgctgaaatgctcagcttcacccttccttcatcctcactctgatccttcttatattctctctaaattaacggaacaggtgtttatggaagagtaacagaaaggggaggagaaaaaaagaaaagaaaaggtattggggaacaaagaggcaaagagaaaaaaagaaaaggagaaataagtggtgcttaaagcggaagagtccttttaggcaagatgactagaagacaaaaaaaacctgacagtatatgcctcctggtttgataaaatatgaaatacatacttatcagcttggattttgttttgtaaacttttcatgaaaataaaagtgtacaagccatttatgttttgtacacgcaaagattttatttttatttttttggatccagcgctggctaaaaaatgtcacgttaccctttttttcctttttgtggagatgggggcctcactatgttgcccaggctggtctcgaattcctgggctcaagtgaccctcctgcctctgcctcactgagtgctgggattacaggtgtgcgtcaccacacactatgcaaagaattttcttaacgaacccaaccacgtaaacagcattcagttcaacaaacagaacataaccagtccctagaagccccttttacatctcctccatcactataccctgcatatatatactatacatatacagtatatacatatacagcatatacatgtatacagtatatacaatatacatatacagcatatacgagatatacgtatacagcatatacgatatacgtatacagcatatacgagatatacgtatacagcatatacgagatatacgtatacagcatatacatgatatacgtatatagtatacatatatactataccaacgggaacacattgtctggacttttttgcctgttcttgaacttcaggtaattgtctcacacattgtttctggcttcttctactcaatatcatgtttgtgacgttcacctatatcatggtgtgaagctgtagtttattctttttcattggtatacagtattccactgagtatatgtatgtgtgtgtgtgtatgtatatatagatagatatacagatacagatagactgcaacctacttattaatttgactgttgttcatttgggtagttttcagttttgaggtgttatgaatagtaagattaaaactaaatgcaatgcacaaaccacaactagatcttggggaaagctgactatgcactagatgttacatatatcgaatttatgtttattttcttagatgaaattatgctactgggctatgttgggaatgtcattgttagacaaatgctgaagtatttacaaatgaaagattgagatgcctccaacttccatatcattccaaaacaaaacacacattatacagctaaatatggcaaatgttaacaattggtgaatgtagataaagacctaagtgtgttccctgtactagtcttagcttttctgtatgtttgaaaatttgtataataagagttcaaaatataaagctgggggaaaaataaatacaatgatacctaagtataaacagagacactgggagaaagacacagtagtggaagagaagggacctagcagtgagaaacccgttttgagtgctgcactggctgctcaattgctgtgtgatcatgggaaaatcaattaacctctctgagccttacattcaccaccttcaaaatggattgtacactcatgaagtttactgcacacatggagcaggaatgcaatggttcatgatattattttaactcccagaccatgtacctgacttgcagctacttccagggaccatccacttagatctcaaagtcaacaaatggaactttccattcttcctccctcttaggaaaatgcttccctctctttctgacagtagtaacataatttttccaggcccttagccaggatcctaagacgtagactcctctctgactcttctctttcctcccctctggccaatctgtggcccatccttggaagcatatttcagtaaacccccttctacatgaccactggcctggttcctgctcttaccccagtgcctacactatttcaaccctccagactggccgtaccctgccgtcaatccaattttcctcaagtaaaacctccatcacattactctgcgcagaaaaaatttttaaacaaggacccagagtcctcacggactcctcagcggcctcactctactcactcctgcctcctccttactcctctgagcactcatctttcactccaggaccctcaccatcctgggaaccagcctgcagagtcctgcattcaggtttctgcacctgctactttttgcctctgtgattccaaatcctgttgtgagttcttgctccagtccttgtggacattactgcaattacaacccagacaacaaggtctgcacctcaccgtctgctaatgagaacagacgaacaactggaagtgatctgggcagccacctagctcaaccctgccctgtgcattcagtctctttacaggtgaagcagctcaggcccagccccaagcagctgtcagtacaagcaccaggacaacccgagtgtgaatcccaggaagacctgaaagctgggacagcaagtgaatggtacacttgggaaacaggccttcgtgtcacctggcggcagaaatgttcaggtatgggcttgagttgctctgagttctgagacactgagctggtgaggggacaaggacagaaccagtctccagaacagtcagaaatggccaggagagcatgaaaatcttctgagaatgggggcgaggggctcctcaccccacacagcagcatcactgggaggggaatatccctgagggggaccctggcaccaggacactggcacctttgtctggggctcatcactcgagcccctgctttgttctgtcatcctctgccgttacagcaatcacacatctccacataaagtatgctgacatctttctgccacttgcatcactgccacactgtgtcaaccgtgccctggacccaggtctcccaggagaccagtgccccttaccgtatcccactattacatgcacatggcctcttcccctgaactctaagaccccacaggcaagcgcctttatttttaactcttcatagtgaccagaacagcaatggccacagagccaagtccacctctgtggtgaataaatgagtgaaggctgagggctcctacaagaatcccttagtaatacttacagcactaactaaacaatctaacactaccatggtcaccacacatttagatatgtcacctcccttcatcctcatggcaccatgaggacaggttccatgaacagccccattccacaacagaggaaactgagacctggaaagctcaagggagatgctcaaggtcagggtcagcaagtggaggggcaggatggattctcttacgtcctgaaggaagcacagggataatcttgctcttccttcaaggcatttcaggataaggaaaggctaggtggggtcggtacagatgggtggtcagtgtacaactcacaaagaagttatgaaacaaaaaagaagaaaatcaaagaacaaggacaggccgctccagccacagtgtttcctctccccgccggcatcctgattccacgcatgcagactctccatactgtcccttgccctggcagccccaaagccccgcagtgcgctctgctggcagcccctgtgggctctctctcgctgctcctcctcccatgagctgctgtcacacacaatggccgcatccccccaggctctgagcccaggtcaaacccagccaccacctgagtcccagcgcagctctgcttcctctgtgactcgggccactccaacctctcccatcgcgaagccccctcgtgccctcctacgtgcacaccgtgagctccaacgctttcgtgcacgttagtcctgcccacttcctgccgcaagagaaaaccactaacacagggcccacatgcagggagcactcaataaatatctgaacaagctcagatgccccatcttttgctgttcgtatcttgttctcaagccctcagtgtctttaatcatggacacaatgtaggtgtttgggggtcctcatgaccgacctgtctccatacagccagaataatggcctcatgttttcctgctccatcatttggctcctctattgacacaggaaagcagctcctcgtgccccatggtccgtgctggacccatttacccgcctgccatgaagtccccttcctttgccaggagcgccagagctacggcaggacccctgacctgagctttcagaactccccagttcctcacctgtgggtggagacagtcttacctggagagaccctgcagtcctgcggttccacatactccccaaagcagtctatctgggctggggtcacatgcctccactcctcctcagggaaggccagggccatatctttaaatggccccaacccctgcaacaataggagattgctatgaataaagaaagaatcctaggccagagacagtggctcatgtctgtaatccaacttcctcccaaccagcttcctcccaacagttgaatgggagtaatccacttgtttgagccactgcagttgtgagcctctgtggctggggctcagcttgcccctaacaactaagtcacctcatttccactctgcagcagcctcccactcacacctcatgcttgacagagcctggcagccgctatttaccttctcatcaagaacaaagttcacattcggccaagccctgtcttaagaacaaggctgtgataaaataaatgcatcctcaatttctcactcactgcaccacgaagaactattatggtacaagggaggatccaaccaaattaaaaagcactgatgtcattcctcatcccctccaaagtacatccttggagaacaggaaaagggaaatgatgctggcatccagccttgcccaaatacggcttgagcaggaccagacttgatccccttcttttttctgccaaacaccttttcttcttcaaagaactcttttagactcgcctccttgaggaaggtgccccactggaaagcccccacctccctgctactagtgctcagcaccctgtggaaaagagagcaccccatctatgcttcagttacctcatttgtggcagatgagtaatgttaacgaggtccaactcctagtgtggcctgtatggccaaagagaccaccctgctcaatgcttctgaaagccccaaccctgagtcagccacattcctgctgaggttaggggacaggaaagtttccaaaacagaaaaatcagcagcagaagtacccataaacggcacccacaaagggttatctcggggccaatcagcacagcctagatagccctagggggtttctatctgtaacagttgtaagagtccatctgtggctgggcgcggtggctcatgcctgtaatcccagcactttgggaggccgaagtgggtggatcacaagatcaggagatcgagaccatcctggctaacacggtgaaaccccgtctctactaaaaatacaaaaaattagccaggcgaggtggcaggtgcctgtagtcccagctgcttgggaggctgaggcaggagaatgatgtgaacccaggaggcggagcctgcagtgagccaagaccgtgccactgcactccagcctgggcgacagacataaggttcgatgtaaattaacaactgcggctgatggttcagtggaggaaaccacaccatcaggtccaccgggactaggaagggagaatgactcaacttggggcgggaagggaacactgttgtgcagagaaaccttggggaaggtgaacctcaatcaaagcaacggtcatgatttctgcaaagggagtcagagctcacctgcgatccagcagtaaagaacccagctgccatctcttggtctctgggattcactgcggggaggccaggacccgcctgcagaacaggtagtgctgagcagggacaaaaagcatgagaaagatcagaaggatcagtgatgttatgctgttagctcgttcaaatgtgtcccctaccagatgctcacaacctcaggaaccagaagactccagacagaatcccttttcactctggtaccacactttcccatgcacaggggcctgggtgtcccttgccctattctcagctggggcctgggtgtctcctgttctcagctggcaagattgtcccggccctgtccgtccagggctacccatgctacccagtcacactctgggaataacctcctatgagattcaataacaaaataaagctacgtgggctgggcgcggtggctcatgcctgtaatcccagcactttgggaggctgaggtggacagatcacgaggtcaggagatcgagaccatcctggctaacatggtgaaaccccgtctccactaaaaatacaaaaaaattaacagggcatggtggcacatgcctgtaggcccagctacttgggaggctgaagcaggagaattgcttcaacccaggaggcaaaggttgcagtgagctgagatcgcgccactgcactccaacctgggtgacagagtgagaccccatctcaaaaaagaaagaaagaaagaaagaaagctacatattactttgggggatatggtttatctgcctactgaaaaagtattcctgcaagtcagctgaatatttcttggtagtttctagaagggatctgagggaaagaaaagagaaataataagaaagcatgatcccagatatcccctccagacaccagagggtaaagggagaagaaacaatttcacttcatctatttcctaaggtggaggaagtagccaagaaaattcacaattacacctcgtgggtaacttagttgctccattgctgggtttctgaagagagttggctgcacagcactgtttcctatgacctgacatccccactatctgcgtcttactcaccttgctcctggaaggcccgtgtctcatctccagggtcctgactgagctgctcctcggtacctgggtctggaccttgaactccttccccagggggcatcccccattcaggcttgacctccactggccccagctggatgcctggctcccaagcgcctctgcaaagtgctgtttcctcctgctctccctgcctgtggcatggaacctaagaacagttcccaacaccgattagaatgaggcctgggcaaggctgttatgaagggagttgaactaaaatctaaaaagagaaccaagaaaagaaccattccagcttcaggggagaggaaggaaaaatcagctgagctcttccccaggacattagtgaggaagtgaaaaggaagctaaactcatgcatcaggccctgagcaacttttatctgtccacgccatttgacaagggtcccctctacctgccatcaccaagcccaaatattatcctgctgaggattttaacacaatatactcactactagaaaaaaaaattcctaattgaaaaagctgaaaataaaaaatgcaaagcctagaccctgcagtgaacaggccagtgagaaatagttgctttaaagagagccaggaagcctgggcaacatggcgagactccatctctacaaaaaataaaaaaattagccaggcatgcatgcctgtggtctcagctactcaggaggctgaggtgggaggatcaactgagccaggagctcaaggctgcagtaagctaggattgtgccactgcactccagcctaggctgttgactgaccctgtctcaaaaataataaattaaaaagagcaagaaaaatcaggaggactctctcactgagaagtactcacaaaaacaaggcatttctgggtccacttttaagctcctgagttgagtaggaaaaaattctcttaggattctgaagacaggaagtcagggtgacgagagtgtgcacgggaggctgaactacagaaggacgggggcttgtgagcaagacggtgtcatcagtcctgctctcctttcccagtcatccatcagggggctgtaccacaaagtgaccgaaatatggctggaacctcaaggaagcacgtgcggtgccaaatcacttggtgtcattagagcagcaccagagaattgttacaggagccctatgagccacagagaaacagtactgccatggacaacccttttccggaaaaatattccccaggtgggattctctgccttcccagaggcatctctgtccaaagcagggtcaggtctatgagggaccccaaaaacaatcacaactgccttctttttgcctgatgcccacaagggaaatatggccaggcctctgccctcatgaccaaacagaggcttcaggcccttctgcatggcagcatctcccctgggaatggcctttcttgctgaaaacgccactgctctccaaaaagaacctcagggagtctgagggcagaggagggcggctccacacctcgtccactcctactgcttcctcaaatctttggattctttaacattccctgcccacgccaagggcgccagacctggatcccctcctcacccaccgccttggcctccagtgctctttctgtcaggtcctccaccatggcggccagggccttgccactctctgggccatgctcccggatccaggcgtagaactcgcggggcaggatagtgaggaactgctccagcaccagcagctccaggatctgctccttggtgtgcaactcgggcctcagccaccgacgacagagctcctggagctccctaagagcttcctggggtccagctgcctcctggtagcggaactgccgaaacctcagccgaaaagtctctggactagggtcctcccttcctctgccccatggcaactctttctccagtttcaccacaggaatacccaactgctgctgaggagcttccgccatctctggatgctctttaagcatcttcagactccctccgaggagactgagaatgactgcatcaatgacccttttgagaacaagagacacatgaaaggtcagcccatcccagttctgtctctacatcaaggaatattccactggagaacacagtaattaccttttacaaggcattttcaaaagactgaacacagatcccaaaagtcaggtcaattcaacatagtaatcatttgctaagcaactattaggtacagagactaaacagaaaatgtctaagattttgcttttatacccacaaataacttaggatctcactggagaataacactacaatcagagaataatatataatgggttataactgggtgagtcaccagggcctactcttccaatactaaaggaaacatacatgcaacacacaaacacacacatatacacacacaagaggcaggcagaaacaacaaataaaatagaaaacaagacacactgggagcttaccctcctgaaactcatatgctggtacagcagacagaaaaagtcaaatggaagcaactcttttaaaaactgcaagtggagacaagttctagaaagaaaataagtagggtgctctgttaacagggggcaactgacttgaagaaggcttttctaaagacatgataccaggctgactcaaggatgagaatgagtcagtcattctaagagcattccaggcaaaagccctgaggctaagaaattactctgggtgtccaagaacaagccatatcccagtgtggcttcagcagtgacgagcagagctgcaccagaagaggtggcagaggcagacagaaaccagatcacccagagcctgcgccacagaaagaattatgaactttattcttatttcttactttagcgaggaactacatgttttataaaagtcattctgcctgtgtgttgacagggaataggctagaggtggcaagagggaaatggcacttacagtgattcaagcagatgataagggcttagatcagggtggtggcaaagagtcagacaaaatcaagacgtattttggagattaaaaccaacaaacttgctgatggcttagatgtgatggtgcgctcaacctgaaaaagacaatggagcaacatatataccattatgacaaatgacctaaagatttctaacttgtacaggctttactctttagaaagcatgtgaacacatatttcatctaatacttaaaacacttctgtaggatgagtgctactcctcctacttctcagaagaaaaaaaagagactagatgataactgcctcccaaaatacatggtacagattgaaaaaaaaatgtgaagtcaaaaagagagaaaactaatctaagtccaagtactcaaggaaaagaagaggcttgaagtagactggagaatgagtcctatttacctccaagtggattatgcggaagacctagactgggaagacagacttggaagtccaaagcaccaggggaaggagatcctgcttgtcagaaaacggaaagatcacctgactggagcagagaatgggcagctggcaggaggcacaccccaaagcttctgctaaatattctattgtgagtttgtgtatttatctacccccacttaaaccaagtttatattttcagtctattcattgactctgcaacattgagatttctctttcattcctttctagctattgcattggttcactccactagtgcatttaatgcactacagtgcaaatgtttacccatgtgtctccctctaacagattccctggaggcaagaaagatcctcattcatcttttatctctgccatttgacaaatagaaattgccccattgctattctttatctccccccacccattgtgactcttttgttttgtttctgagacaggatctcagggttttatcaccccagctggagaccagtggtgcgatcactgcagcctttgcctcctaggatcaagcgatcctcccacctcagcctcccgagtagctgggactactggcgagtgccaccatgaccagctaattatttatttttgtagagacagggtctccccatgttgcccaggctggagtgcagcggcatgaatgtaagtcagtgcaaccttgaactcctgggctcaggcgatcctcctgcctcagcctcccgagtagctgggacctcaggcgcgtgccaccacgcccggctacttttcaatttttgtagagacagggtctcgctatgttgaccaggctggctcatcactattctttaaataagtgtcctatgtgattactttcactttgcacagagttctgctttggttcaagatctcttcgggttcgtggccagccctgcactaagccaagcctggcagagcgggatcagcctcgctcctacctgagcctacagcgcggcggcccctcagcgtccagacccgcagggcctcggggccgctgaaggcagctcctgagagacttgccgccctcagccggggctgagcggagggagacgggctctactgcaaccccgctgccgccgagccccgtagcggcaccaaaacccgtccccgcgcccgtttaccacttcgcccgccacccgctgcggccctgaagaggctctcacccgccgcggccctgaagggcctctcacccgctagggtcgccagtgctatccgcggtccggaagtgagctgcggacgctgttagacaggtgcgtaaggaaagactcgcttccgtgtcctctctaggatgctcggaggtctcggcggatgcgtctcgatggttgctgatcccagcctgctgttccgaacccggcgaggcgaagaccaccagggcttccccaggattgactgcccagctcgaggcgctctgtggctaggccccttccacttccgtgccatttcacctgcttgccctccgtggaaaggactcggtgcatcgccagatacactactggacacagcacctgccccaaggggctttagagtccagtcggtcaatgcgcgactattccggctgcgagggccttgcgcgaggcgtaggggcagaggagatagggggcgcactggatctaaccggctcacttaagaggctcctgaccccgggtagtgtgcgtgcgtgtgtgtatgtgtagtcagggaaggcttcctggaggagccagcatcggagctgttttttgtggggggtttttgtttgtttgtttgtttgtgttttttgagaaagagagagagaagtcttgttctgtctcccaggatggagtgcagtggtgagatcatagctcactgcaacctcgaagccctgagttcaagcaatcctcccacctcagtctcctgggtagctgggactttttttcaattttttgcagagagggggatctctctatgttgcccaatctggtctccaacttctggactcaagcgatcttccccccttggcctcccaaagtgctaggactgcaggcgcaagccaccgcgtccagcctgaaggcagtctgtctcaactgggtggcccagtgttactccagaatccactcaggaaacaggaaaccctcttgtcttactcttctccagcactttgcaaagtgtctggtacaatatttgctaaaaatatacacttatagagtaaatgaactcctagaatataacataggtgttagaccatctcactttatcctccatgtctctgtcccactttcatatttttcttgtctgcccatatttgacttgggtttatgtcttcacctttttattaataatccacttttcagctgtttctaatgtgctacaaaatccacagttgttgtttttttgttttgttttgttttgttttttaagagacgaggtcttgctgtgtcacctaggctggagtacagcggtgctatcatagctcactacagcttccaactcctgggttcaagcaatccacctcagcttcccaaatagctgggactacaggcatgagccaccacacccagctaatctttaaaaaatgttttgtaaggacagggtctcactatgttgcccaggctagtcttaaactcctgggctcgagcaatcctccccacttggccacccatatttttgttttaattaatatattttttccatttctagaatttctatttgattttttccaaatattctagatcgatcttttaaaagaatttaccgatatgtttaagcttttctttgtacatagtaaatatagttgagcctgataattctgagatctgaagtcccctcagatatctttctgtgatctgctatttccactgtttttgatggtgccacttccaccagcagtacctaacagcatccatttcccatatctcatcatctctgccattatccagctttaatttttgccaattgacaggtgaagtaaatgttacctcattttttaatttgcatgttcttcattataagtgaggtcagtcattattcctactttcattaacttcttgccttcccttttctgtgaacggacttttctttgtgtttctattaagctgtttatctctttcttattgatttatgagttctggggacattatataatgtccctagagcattaaataatgtccccaggacattaattgggggcattcctcaaacataccttcctcgaacataccacagtaccttgtttccttgtgtgacaggctgctcattttccttggaaacatttttgtgaaatttctttgagttccaggataaagtgaatttatctagagagggttgatattgtttttcttccatgtaaatttttttcttgtcagcatcaccagtccaaggtcattgtaaaccaaatttataatttgaggatttttgaaccatgctataatagtaatatgaatttgggctgcaaatattgaggggtgatttgtggttgcaacttctcaaccacaaatctttgtggttttgtggttgtccagcgtggcactaagacaaattgccttgctggctcctggtggtaggggtacgggagaggagacttatctctcacccttacattgataacccagcccttgtctatggccataccaccctgaatgtaccggatctcttctgataatccacacttttgcagtccttggtttatggggggaaagctctcttatcagatgctcttccttgagtaaactttaggcatagttttaaaaaatcaaatctctgcaagatgatttctctaggtattattctttactttgatgttatcttataattcattactattttgttacctgatatctttagattttattatttattttatcatttctgttgtttttggcagacgaatcagcccaactatttagtctgccatgttatcagatgtaggatgtctccaggcttctttatttatatgtttttatttcttccaaataggacacttaaaattacatttttactgcctgtataatattctgtcctctgaatacactatacttttaaaaattatttcaacatgggggaaataatctagaatatactcttttatttttgctattataaataacctggaacaagcattcctttgtataaatacttaacctcacccctggttatttccttagaataaattcctaaaattcaacttctgggccaccaggtatgaatatttttaaacctattaatgcatatgctattataaaatgctttccagaaagttcatgccaatttacattcccatcaaatgtatatgagagtgctcaactcaccaaaattggctaagactggtttctaatctttgtggatttgattttcatttaattttttttatttgaccacttttatagggctttagtaaaaattcttcccaagttctggcaataaatccatcatcaatcctagctttcactggtggcatgaatttccattctttgtgtgtttgtttgagacagagtcttgctctgtcaccaggctagagtgcagtggcgctatctctgctcactgccacctctgcctcctgggttcaagcgattctcctgcctcagcctcccaagtagctgggactacaggtgtgcgccaccatgcccagctaatttttgtatttttagtagagatggcatttcaccatgttggccaggatggtctcgatctcttgacctcgtgatctgcccacctcagcctcccaaagtgctgggattacaggcgtgagccaccacgcctggccgaatttccattcttttctggttatttataggaatttgggtgagaagatgggggaggtgagtcatggactactggcctattctaattctaagctgaaataactaagtcaggctgattcttaaatctttccctctacaggccccaatgccctttccatgtcttccacccctccccaacacacatcccaccatgtttgttctctattgcattcatagccattccctcttagggtgggtccttctcaggcatctgagggttgatatttgctaatgatttgaaatttgctacccctggaacccctatatgttctctaatctgccctactgtgcccaccaagccagtctcccatctgtggcttcccaaactggttatgctggattagggtggtttgggccacagatacataagttggagtttgtagatgttctctattcctagtttcactgacaattacagttcctatggtttcttttttaagatggaaaagtgagacaatttggaactaggctgtaatcgtatccctataagaaactcccaagataccttttggagagaaatgtaataagaaattccaggctgggcgcggtggctcacgcctgtaatctcagcactttgggaggccaaggtgggcggatcacgaggtcaagagatcaagatcatcctggccaacatagtgaaaccctgtctctactaaaaatacaaaaattagctgggcatggtggcacacgcctgtagtcccagctactcaggaagctgaagcaggagaatcgcttgaaccagggagccggaggttgcagtgagcctagatcgtgccactgcactccagcctggtgacagagtgagactctatctccaaaaaaaaaaaaaaagaaattccaaaagaattggttgttcaagtgtgtatgtcttagttcctctgcttgggtgtttgcttctaggaacagggacaaattctgaaatctctttgtaccccaaggtgtaccacatgagttcaccttcaatgaatgctgtttaatcaccagggagtccatgtgactctagccatgtccattgtatctcctctcccaaaagacatccacagctccctgcacttgctttagaagttgcactgcttaagtgctaagagctttttctgcacatttgttctttggagagagaagtgggaagccattggtaggtggtatctttgagatgaaggatggagattcatatggtttggctttgtccccacccagatctcatcttgaatttgtagctctcatagttcccacgtgttgtgggaggggcccagtggaagataattggatcatgggggcggtttcccccatattgttctcgtggtagtgaataagtctcatgagatctgatggttttataagaggtttccctttttgcttggttctcattatctcttgcctgccaccatgtaagacatgacttttgccttccaccatgattgtgagcacccccccgccaccctgagccacatggtactgtgaatccattaaacctctttttctttataaactacccagtctcagataggtcttcatcagcagcgtgaaaacagactaatatagagatgaagccagtggagggcttggatcactgttctagctgccccactgccccacacatgtgttcttcccagctacacccattcttgctaggaggctgagtgctccctgtgatgcaagcaccatagggctgtgaatggagcacactggaggagcactcgggaggcctctggctatagggaaatgatggaatgccagatatattgattggctaatgtgcagtcctaattatggaaaaggagtcaggttggtgtgaggaggggaaagcaaaaagaagaagcagataagctacaagtcggcctttcttcatggtccaggacacgtagccctcctgtgcaaataactcacaatcttcctgcgcccaagctatcaccagacacctgcaagttagctcactgcaacactggcattatcagtactgcacaaagccctcttcagcatacagcataaacactatgccatcaaatctccaacaagtctttgtttcctttcagtcagctcctcttctgctggtcctgcctgttgctccctggcaatgtactttttttttttttgagacggagttttgctcttgtttcccaggctggagtgcaatggcgtgatctcggctcactgcaacctccacctcctgggttcaagcagttctcctgcctcagcctcccgagtagctgggattgcaggcatgcaccactacacccggctaattttgtatttttagtagagacggggtttctccatgttgataaagctggtcttgaactcctgacctcaggtgatccacccgcctcggcctcccaaagtgctgggattataggcacgagccaccacgcccagcccggcaatgtacttttatacttcctttaataaatctgcctttctttatctacaaccgtcttggtaaattcttttacccctgtgccaccagcccaaatagttgtcattcccccgagtatattctgtattctgtacggtttctgtttcacaaaatcccatttcacttggttatcttgtaatattcctccctcccctcctgccctgcggacttggtttttgagatatggatgaacaaagtagcccttctttttattgaaaatacctgcaaaaacgtcacttaggaagctcagaagagttgaaaggacttttagcaaatttcacatacaagcaagatagaatcactgtgagtatggggaggtggagagttgatctgacacgcaagaagctcctcaaaggcacagatactggcagagagggtggggaggactacaaacagctacatgtgtacactcacatggcttgaagaagggtaaagaagccatgtcctgggctagatgactgtttctgctgtcacctgtgtctccttttgtactgagctcggttctcctcccaaactctccagattgtccaggtacaggctcccgtggtcctcctccatactctgggaagtggacaacaagtgccagcaagggcaaaccatttcttgaatgaggcagatggtacctagggaacagccaacgtttgggtcaggtcagagaaagtccagagctccacgccctagaggtcaggtccctctagctccagagctgccctccctcattctgccccccaatctagagtattacagagagagattacagacaggatgcgtcaaaggacaagaagtacaaatacatgtataaaatcacagacccatggtcagcacctagaagacatctcagcaatcatgtagcccattaatgggtgaaaaaaaaaactaaggtttagagaaaggaagttccaacacaaaacccaggcccaacccaagaccttcagtgaagtaaaagatagacaactgacacgaataagaacaaacgagggatggacgtggtagttcacgcctgtaattccagtgctttgggaagccgagacaggagggtcttttgagcccaggagttcgagactcatcatgggcgacatagcaagacctcgtgtttaccaaaaaaaaattaaaattagccaggcatgatggcatgagcctgaagccccactgacttgggagggtgaggcaggaagatcacttgagcccaggaggtcaagggtgcagtgagctatgatcacaccactgccctccagcctgggcgacagagcaagaccttgtccctttaaaaaaaagaacaagtggccgggcgcggtggctcacacctgtaatcccagcactttgggaggccgaggtgggtggatcacaaggtcaggagttcgagaccagcctggccaacatggtgaaaccccatctctactaaaaatataaaaattagccaggcatggtggtgcatgcctgtagtcccagctacttgggaggctgaggcagaattgcttgaacccaggagacggaggttgcagtgagccgagatcatgccactgcactccagcctgggtgacagagcaagactccatctcgggaacaaaaagagacaacaaatggagatatcttgagtaaatgatcaatgctgtgttaagatgaagactaagataaaagacatcttctattttcagcattatagcagactactctaccactaaaagccacaaaaattttaaataaaatgtgagagaacttcaaagaattcatggaaatcatggaaaaatggaattaaaaggttaaaatataaaatattgtaactctatttggtgaaggggaaattaagaaataaaagcttaaatatgtggttttttgtttgtttgtttttttgagatggagtcccgctgttgcccaggctggagtgcagtggtgagatctcagctcaccgcaacctccacctcctgggttcaagtgattatcctgcttcagcctactgagtagctgggattacaggcacgcaccaccatacccagctaatttttgtatttttagtagagatgggttttcgccatgttggccaggctggtcttgaactcctaacctcaggtggtccacctgccttggcctcccgaagtgctgagatgacaggtgtgagccagtgcacctggccatatatacacatatatgtgtgtgtgtatatatatatatatatatacgtgcacacacacacatatatgtatgtctatatacatatatacacacatacatatatatgtgcatatataaatatgtgtgtgtgtgtgtgtgtgtgtgtgtgtgtatatatatatatatatatttttttttaactagctggccatggtggcacatgcctgtagttccagtgattcaagaggctgaggcaggaggatcgcttgagccccagagttggaggctgcagttgtaccactgcactccaacctgggcaacaaagcaagaccctatctcttaaaaaaaaaaaaaaaaaaggtagagacagaaatagatagcctaaggaaccaggatggtggaagggagactataaaaatttgaaagagtttagttctaagtcaagaaggataagaacaggaaggccaaggatggggttgaagctccagagcagtgctgtcaggtagaacgttctgcagagaaggaaatttctctgtctgcactgtccaatatgacagtgtccaatagccactggacatatgtggttattgaacatcggtgatgtggctagtatggctgaggaactgaattcataactttttattttattttagagatggagttttgctctgtcacccaggctggagtgcagtgatgtgatctcggctcactgcaacctctgcctcctgggttcaagcgattctcctgcctcaacctcccgagtagctgggattgcagacatgtgccatcacgcccagctaatttttgtatttttagtagagatggggtttcaccatgttggccaggctggtctcaaactcctggcctcaagtgatccacccatctcggcctcccgaagcactggaattacaggtgtgaaccaccacatctggccaataactattttaattaacgaaagttaaatagccacgtctaactggcagctgcggtttggaacagtgcaattctagagaatccaaagggagggcctccacaagacaggttcctaaatccagaccgaggacaagaagcagggcactgttccctggacactcaccagccactatgaacagaaagatgccgaagcccagcacgtagtaaggccacagcacggagaactgcagggggccgagcttcatcctcagagccttgatctccagggcatgcagcaccaaagccaggaaggcacaggcccctggagggtcacagggagacaccctcggtctcctcccatgctacccgccttccctccaaacttcaccccctgtggctcctgcctggaggctccttcatccttgccccctctctgaaacaaaactcctacccagatgcctgtccctccctcctttctgactcatcttcaaagcccatgtgctttaccttccagggaaccatcatcagaactccctttcctagcaccctctgcatctgcccttagctcacctctgcaccttagcagagggtgcaacactttggattaaatgcaatcccattttcctactgctctacctccaccatttgcctaggagcctctcagggtggagcctgggtcaccctttataaatgtcaaaaggggccaggtgcagtggttcatgcctgtaatctcagcaattgggaggctgaggcaggaggaccgcttgacaccaggagttcaaggccagcctgggcaacatagcgagatccccatctctaccaaaaaaaaaaatgtttaaattagccaggaatggtggcacatgcctagagtcccatctacttgggaggctgaggtgggaggatcactttagcctgggaggttaaggctgcagtgagctatgatagcaccactgcactccagcctgggtaacagagtgagaccctgtccctaaaaagaaaaattatgcctcttttgacatcacagagactgagcacccctctttctctggactcctccccaggccctagcgaaggtcagggatcacctagctgttccacacctgtgaagaagctgatgcaggctaacacaaagttttgcttccaggtcctcgggaagaactcggatgcaaagggcatcatgatgaaggtggtgacgaaagccaagaaaactgcagagagcaggaaaacccggccgaggatgatgtaaactgcaggggagggagaagtggggctgaagctgggaaccctgacccggaaaggtcagagtccctcagagcctgggcagggctggcccccggagcctccaccacccttagatcccaaagcatggccttgggaccaaggttgtgaccatgccactttggccccaagaatgctttggccccacaatttgattcccaatggcatagaaatataggaaaaaaaattaaattgacaatgtcagacactgaaatcaccagttcttaataaacatattttttctttttttgaaacagggtctccctctatcgccccagctggagtgtggtggtgcaatctcagctcactgtaacttcgacttcacaggctcaagcaatcctcctgcctcagcctccagagtagctgggaccacaggcatgtaccaccacacctggctaatttttttatttttatgttttgtagaaacagggtcttgctctgtcgcccaagctagagtgcagtggcaccatcatagctcactgcagcctcaacctcctgggctccagcgatcctcccattttggcctctcaacgcgctgggatgacaggcgtgagccaccgtgcctggccttaacaaatgttattatgggaatttggttgtaccaaaccatgtatcatccactaggggaaaatggtggttttaaaaagcaacacaaaatcaaactcttgtgataaaatttgttgcacatgcaaatgtgaagaatcacacctgtattggttaccctgaagtaattcgcctgtggaaaatcaaaactttgtgaggtcaaaatgttctgaacgctgagggaatccccacatctttatttaattttcctagttaataggagtgagactgggtgcaatggttcacgcctgtaatctcaacactttgggaggctgacgtgggaggattgcctgaggccaggagttggagaccagcctgggccacatagtaagaccccatctctacaagaaattttaaaaagttgggcacggtggggcacacctgtagtccccgctacttgggaggctgaggcaggaggatcacttgagctgaggagatggaggctgcagtgagctatgatcacaccagcctgggcaacagagcgagatcctgtttttacaaaacctaaaattaaaaaattagctgggagctgtggtgcgcacctgtagtcccaactactcaggaggctaaggtgggaggatcgcttgaactcaagagttggaggctgcagtgagctgtgatcacaccagcctgggtgacaaagcgagatcctgttttttacaaaacataaaattaaaaaattagctgggagctatggtgagcacaggtagtcccaactactcagaaggctgaggcgggaggatcgcttgaactcaggagttggaggctgcagtgagccatgatcacgccactgcacttcagcctgggcaacagagtgagtccccatctgtaaaagcaacaacaataacagaagtagtgaaatagaccaaaattagcagagccagagtctgataacagggtgatttgttctctgactgctggcatgatgcagacccatgtgaaaatgagtttgcataccctcctgagctggcagaggtgggcagctggcagtgggataaggagtcaaagttgctgttgaagccccagatatcccagagtctacccttgggttaaccaagcctggttaattttttgtgttttgttgttgttgttgttgttgttgttgttgttgttgttttgagacagggcctcactctcactcccaggctggaatgcagtggcatgatcacagctcactgcagcctcgaacttctgggctcaagcaggagccctccaacctcagccttttgagtagctgggactacaggcacatgccaccatgctcagctaattttctcatttttgtagcaacagggtttggctatgttgcccaggctggtcttgaactcctggcctcaagcaatcctctcgcttcggcctcccagagtgctgggattacaagtgcaagccaccgcatccagccctgagctaattagattttgtcctctctgctcccaccctgttctttcaccccccacctctgtcccaacactggccccatctccctctctctcctccccgcctccatccctccttactggataagggtcgaggcttccagcatttggcattgaagcagttctcaaataggccactgaaaaagacttcgtgggactcctcgtttgtcagtcgcacccagaagggaaagatggagaccaccagtataatcaggtagcctagggaggttaaggctgggactatggcccaggagaatcccttcatgtccttgtcctctaacgtcagcatcacctgtgtaagagaaaagtgatcgtggaggtgggacaccgacccaaattctcctgcagcacagagggaaggagacagtggctggggaaatgtcagtgctgtgtgtggcgcatatgtgaaactcagtaaatgatgatttctttgcttaactttacagcctatacacctctgcagcagaccaaaaaaaaaatgcataaaatgctttctgtcgctaaatcactgggtgatcttgggcatgtcaggttccctctctgagccctcttcctctggtaaactgaggaggttgaactgggccattcacaaggcctcctcagctttaaagttctcaactttcagctgggtgcggtggttcacacctgcaatcccactactttaggaggctgagacaggcggatcgcttgagtccagaagttcaagaccagcctgggcaacatggcgaaaccccgtctctaccaaaaattagccaggcatggtgttgcacacctgtagtcccagctactcagaagcctgaggtgagaggatcgcctaagcccaggaaggtcaaggctgcagtgaaccatgatcacaccactgccctccagcctgggtgacagagcaagaccttgtctcaaaaaaaaacaaaaaaaaaaattaaataatttaaaaaaaagaaaaaaactaaagttctaagctttcaattctttttttttttttttaagatggagtctcgctgttgtcagcccaggctggagtgcaatggcaccatctcagctcactgcaacctctgcctcccaggttccagcaatactcctgcctcagcctcctgagtagctgagattacaggcgcccgccaccacgcccagctaatttttgtatttttagtagagacagcgtttcaccatgttggccaggctggtctcgaactcctgacctcaggtgatccacccgcctcagcctcccaaggtgctgggactgcaggtgtgagccaccatgcctggccctaagctttcaattctatcaacagccacctctactggccatcaggacaactccagcctattttgcagtcaactgtcttccttttgggatttcagactgagaaccaaggggagatattcagaccagagccttaggtgcccttattcagtgactggccttctgaccacaggaactgtgggtttaggtggggagaggtccatgtgcacaggaggagcccctgctgagaaatgagcaggtcatgtacaaacaggaagttttacaaagagttctggtgtttcatagagcctcctgcagcctgggccctcagtgaaggatccctatcacgtggagttcctcccccaaacccatcttctctttcatcaccatctgtcactaagatgtctccttttgtggccagtcactggtggctcatgcctataatcccagcattttggaaggctgtggtgggaggatcgcatgaactcaggagttttgagaccagcctaggcaacacagtcagaccagtctccacaagaaattgttaaaaattagccaggctgggggcatgtgcctgtctgtagttcccagctacttgggaggatgaggcaggaggaactcttgagcccaggagttagagactgcagtgagctatgatcatgccgccgtactccagcctgggcaacaaagcaagaccttgtctctgaaagaataaaaattttcaaaagatgtcatcttttgaatgagtagttacaccgtggtgggtaagtgctggctggtcttgtctcagcttcatcacttcctagctgtgtgatcttggggaagttgctcagagtctcaggaccttgctttccccatctggaaaaggaaggatataacacctgcctaaggataaggaaggatatattataacacctgcccaatgataagaatacaacacctgccactgagaggaccaaatgaaataacgcataccaaagtgtccaacacagtgctgagcactcaggtgcttggttaaagttgggagggcagggatggagggcagacttctaaaattcagatatccctgtgggagaaggggctggaggccacacccaacttcaggacaaattgtttcaacgaatctgctttcccctctgtctgtgctgagcctggcagctctgaggaatgagagttatccagcaatgggaaggaaggaagcagggacggtgattggagctgcagggagggtgggcctggccagaggcctccaggtggcactgtgatgaccctcgctacctggcagtgcagaaagggggcatcaggtgaaaggaagatgtgacaagggaggtgcaccccaagatgacagtctttctttccaagtcctacccaaagccagacctggggacccttgcctgtgccaggctgggcttggcagcatcacggttttcaagctgtgcctgggcagtagagagcacaaggccctcgaagtgagcatgctttcctcccctgctcccacaccctgtgcaaaccttgcccagtgcagacactggggcctctacccaatccccatgcagaccctcactgcagccagggaagggggcgtctttgcccatgcagacacttgctgcagccagggaagggggcgtctctgagagctaccaatggctatggctgaacaagcctaatggcagagggcagaggtgtggctcccttcctgtaccccccacacccaagtaccctggttataaacaggtaaacacatgttcatcttcgatgctgtcagagtgacttgaaaatgtttgtactttctcttcctttctgacattctctagtttctcttcttcccacttgaaaaattgaattattcccttctttccttattatattttgtttttagatacagggtctcactctgtcacccaggctaaacctcctgggcacaagtgatcctcccacctcagcctcctgagtagctgggactacaggtgcgtgccaccacgcccagctaattttttaattttttgtagagacaggggtctaactatgttgcccagggtgtcttaaactcctgagcttaagtgatcttcctgccttggcctcccaaagagttgggattacaggcttgaaccaccacacccagcccttccctctctttaaatgtcccctttccatctcccatccactctccaggtcatacaagtcaccccaacctcagggcttccacttccttctatctaaaatgatgaagtctgttggaccagagggcattgaggcatccttctagtattagaactcaatgggaaggagtcatggctgcatcttgatcctgtcctctgtatagatgggagtacactgggcattctcatttgatagggggcacctcttcctgtctaccccatctccacctgtatgtgactagaagtgatctctgtctcctttattttctacctttttttctctccttcacccaaaccctagccttgagctcatgctggttcttccctctccccaaccccacttccatctcatcagccttcctcatcttctcagttttcccttcataaagttccccaaccttccaaccttcctgtccccacgcctgccacgtctccctccacacctggaacatcaccgtcatccccaggctcctctggcctctgtacctggtgatttggtttggctgtgtccccacccaaatctcaccttgcattgtaataatccccatgtgtcaagagcagggccaggtggagataattgaatcacgggggcagtttcccccatacggttctcgtggtagtgaataagtctcacaagatctgatggttttataagtggaagttcccctgctcaagctctctcctgccagccaccatgaaagatgtgactctgctcttcattcgccttcagccatgattgtgaggcctctgcagccatgtggtgcgagtcaattaaacctatttcctttataagttacccagtcttgggtatgtctttattagcagcatgagaacagactaatacacctgggttccttcctgggggcgggggtgcctgttctgctccccagattttccaaaccccactcccctgaaaagtgcagcttggtgctgtccactccacgcagccctcccagccactccctcagcaaaaattcactgtgcacttacaggtcgccccactcccaatgtaggccaatggtggggattcagagatgaaaaaaggcaggaactcagaggctcttggaactgctagggagagagacacagaaacacatcatgtgatgcagtgcttttgtcttcacagcccggggttactttggggccaggtataccccagggcactaccccttatctgtcccattcccactgccccctccactctccagtgatgaggaccttgtcctcctttccctgggcaccagtccaggtccctccctgaagcagcccttagtgccagcactggacaaggttacatcttcggatacacaacttcagatccgcacggatataggccagactgaaaggtcatagatatttgaatataagaggggattggtagatccttttgtacagaagcagagatggagagctggagagagggaatgactggtggaggattccacagcccatcagtgctggcacagggaccagaatactgcatcactgccaggacagtctcaccagccaccaatggccggcagttcaattcagtgattcccaaatctggaattctgtggatccagagaatgctttcttataggcatgtgcatgtgtgagaaagagagagagaatgggggaatatacgactgccaactttttattttgccaagagcattaaaaacaaagcaacttatctactgtcactggtttggtttttattcaaatttttgttgttgttcttttttgagacagggtcttgtgtcacccaggctggagtgcagtggtgcattcatgcctcctgggcacaagcgatcctcctgcctcagcctcccgagtagctgggactacaggtgtatgccattacacctggctaattttttttttgagatggggtcttgctatgttgcccaggcaacccctgggctcaagtgatcctcccacctttacctcccaaagtgctgaaattacaggcatgaggccccacgtctggccaaattattattttttaaaggacccatgggccgggtgcggtggctcacgcctgtaatcccagcactttgggaggccgaggcaggtggatcacgagatcaggagatcgagaccatcctagctaacacggtgaaaccccgtctctactaaaaatacaaaaaaaaaaaaaaaaaaaaaaattagccaggcgtggtgggggcgcctgtagtcccagctactcaggaggctgaggcaggagaatggcgtgaacccgggaggcggagcttgcagtgaggcgagatcgtgccactgcactccagcctgggcgacacagccacagcgagactccgtctcaaaaaacagaaaggacccataacaccaggaggtaagaaaagctgtgtaccccgtggtggtgcctggaccagcgtctgaggaccactggcttggcaggaggttcctggaccctaggcccccttcagcgcctgagctgcagccccgcacctcccaggccctggcacttaacaggaaagtcggcagctgctctggggatgaaggaagtgggcgacctgaagggcatcctggtttggaatgggaaagagaccttcccttcccactgtttcctccggtcatttgtggcaacttggactgcacattgacccagggtagggtcagaggttccttcccgttgacaaccgtcctcggccctttcccctgaatgccaggactccgcccttctgtggccccaaagccatagggatattttcaagaccccaagctgggccctaaccaggccatccgcccccagcccctgccccgggcgtcccacagccagttaggcgatgttcggccttgggtgggtagggggacttccccacatcctctcccaacctgtggggccaccttgctctcccccatactggtctcccctctacccttccctccacctgcggcaccgtcgtaggcggtttcgcgtcccagagctgggctgccctccaggcgggtcacggtgggaccctcgccctccactccaggctccaccgcgctcctggagcttccgttggccccagaggccccggcggggggttgccccgacccgggggaggagcccactgagcctgggcctctgagcggagctccagctccagctctgcggaggagacgcgggctcacctccctacctgccgccccggccaccgcaaacctggcgggtggagggtggggaaaccaggccctggcgtctgcccacagtaccggcttcgctcacgggtgtgtgggggcggaggaacagagagcgggagggatctgaattcaaatcctagctctgccattaccagcgtggggactttgaataaatttcctgtgtctccttcctgggtcctgggcttctaatctgtaaaatgggaataataatagtattaataatatggtgttaatagtattaacactattatattaatgatatactattaacactattatattagtaatatagtgttgagtgttaacacttatattaataatatagcgttaatagcattaacactattgtattaataatatagggttactattaacactgctatattaataatacatgattaacactattaatcatataatagtgttaacactataatattaacaatataatatagtgttaacactattatagtgttaacacatattatattaataacactattatattaataataattgttaataatatagtgttaacagtattataattatattaataattaataacactcgtatattaatattataattaataataataaagtgttaatagtattaacactattatattaatgataatagtgttaacactattaataatgtaatagtatctacactataataataatatagtgtttcataatatagtgttaggccgggcgcggtggctcacgcctgtaatcccagtcctttgggaggccaaggcaggcggatcacgaggtcagaagatcgagaccatcctgtctaacacggtgaaaccccgtctctactaaaaaatacaaaaaattagccgggcgtggtgggggcgcctgtagtcccagttactcgggagactgaggcaggagaatggtgtgaacctgggaggcggagcttgcagtgagcagagatggcaccactgcactccagcctgggcgacagagcaagactctgtctcaaataataataataatatagtgttaacactattatattaataatatagtgctaacaccattatattaataatatagtgttaatagtattaacattattatattaataatatagtgttaacacatattagtaatgtagtgttaacactatcatattaaaaatatagtgttagtagtattaactctcatattaataacagtgttaacactattatattactaatatagtgtcaatagtattaacattattatattaatagtagcacactgtgatattactaatatctgtaatgttaatgatattcagtgttagcacactgtggtattactaacatctatgatattcatagtattcagtgttagcacactgtgatattactaatatttgtgacattaataatatccagcgttagcacactgttaacacactgtgatattactaatatctatattatctatcatattagtgatatccagtgttagcacactgtattaacacactgtgatattactaatatctgtgatattaataatatccagtgttagcacactgtgctattaccaatatttgtgacattaataatttccaatgttggcacactgcaatgttaataatatctatgatactaaaaatatccagtgttagcaccctgtgttgtgttaataatgtctatgatattaataatatcaagtgttagcaccctgtgatgtgttaataataatatgatattaataaaatctagtattagcaccctgtgacttgctaataataatatccagtgtttgcaccctgtgttgtgttaatatcaatgatattaataatatccagtgttagcacaccgtgataataatatccagtgttaacacagtgttagcacattgtgatattaataatttatatgatattcataatatccagtgttagcacactgtgttagcaaaatgtgatattaatatctatgatcttcatagtgtccagtgttagcacactgtgatattaatattatctatgatattcataatatccagtgtttgttagcacactgtgttatcataccatattattcataatatccatgatattaatgctgatatccagtgttaacacactatgttaacacactgtgatactattcatagtatctgtgatattattactaacacacattagatattaatactaatatccagtgttaacacactgttatattactcagaatattcatgatattactactaatgtccagtgttaacacactgtgatatttttcatgatatcactaatatccagtgttgacacactgtgttaacacactgtgatattattcctaatatccacaatattactactgatatccactgttgttaacacacggtgatattattcataatatccagtgtattactattgatatccagggtgttaatacaattaatatccatgatattatgaataatatcaccctgtgatatccaggatgatatcctgatactgatccactactgatacccaagatgttaacacattgtgttaacaccctgtgatattattcataatgtctatgatgttactactgatatccagggtgtgaacacactgtgttagcaccctgtgatattattcataatatccatgatattactactgacatccagggtgataatgcagtgttaacacactgtgttatgtttgtaacatcatcgatatcactactgacatccagtgtttcacactgtgatattaatgaaatatcgctgttacatttataatatacagtgtttccacactgtgctatgtatgaaatatagtatccagtgtttccacactgtgctatgaatgaaatattatactatccagtgttttcataccgtgctatgaatgaaatattataatatccggtgtttccaaactgtgcaatgaatgaaatattatactatgcagtgtttccaaactgtgctatgaatgaaataatattcagtgtttccacactgtgctatgaatcaaatattataatatccagtgtttccacactatgctacgaatgaagtattataatattcagtgtttccacacagggatatgaatgaaatattatattacgcagtgtttccgcactgtgctatgaatgaaatattaaaatatccagtgtttccaaacagggatatgaatgaagtattaaaatatccagtgtttccacatagggatatgaatgaaatactaaaatatccagtgtttccacaaagggatataaatgaaatatcgctgtgatatttataatatccactgttcccacacaggaataaagttgaaatcctgctgtgatatttataatatccagcgtttccacacagagatataaatgagatatagctgtgatatatataatatccagtgtttccacatagggctataaatgaaatatcgatgatatttataatatccactgtttatacatagagatacaaatgaaatgtccctgtgatatgtataatatccagtgtttccgcactgtgatatgaataaaatatcactgtaagatgtataatatccagtgtttacacactgtgatattaatgaaatatcggttctgatatttctcagtttacacactgtgatattaatgaaataccccttctgatatttttcatatcatggtgtttacacagagtatttacacactgtgatattaatgaaatatcgcttctaatatttttcatatcactgtgtttacacagtgtttacacactgttattaatgaaatatcgctatttatcatatcatagtgtttacacagtgtttacacactttgatattaatgatatatcgcttctgatatcatatcacagtgtttacacagaccattcacacacagtgatattcatgaaatatcgctgctgatatatcacagtgtttacacagtgtgatataaatgaaatatcacttctgatattttttatatcacggcatttacacagagtgtttacacactgtgatattaacggtatatcgcttctgatatttatcatattacagagtttacacaccgtgatattaatgaaataccgcttctgaaatttatcatatcgcagtgtttacacactgtgatattaatgaaataacgcttctgatatttatcgtatcaaagtgtttacacagagtgtttacacagtgtgatattaatgaaatatcgcttctgatatttatcaaatcacagtgtttacacagagcgtttacagactgtgatattaatgaaataacacttctaatatttatcatatcaaagtgttttcacagggtgatattaatgaaatatctcttctcatatttatcaaatcacagtgtttacatactgtgatattaatgaaatatcgcttcagatatttaccatatcacaatatttgcacactgtgatattaatgaaatatcccttctgatatttatcatatcacagtgtttacacacagtagtattgatgaaatatcacttctgataattatcatatcacagtgctcacacagagctttcacacactgtgatattgatgaaatatcgcttctcatattcatcatatcacagtgttgacagagggggtatacacactgtgatatggatgaaatatcgcttttgatatttatcatatcacagtgattacagggggtttacacattatgatattgatgaaatatcgcttctgatgtttgtcctatcatggtgtttacagagggtttacacatatgatattgatgaagtatcgcttctgatatttgtcacatcacagtgtttacacagagtgtttacacactgtgatattgatgaaatatcatctctgatatatgtcataccaaagtgtttacacaggtttacatactgtcatattgatgaaatgtcgcttctgatatttatcatgtaacagtatttacacagagtgtttacagtgggtgtatatactgtgatgatattattcataatatctaaaagacattactcctaatatcacagtgggtgtacaccatgtgatgatattattcacaatatctaaaagatattactcctaatatcaccatgggtgtacaccctgtgatactgttgacaatatccaaaagatattcctcctaataaaaccgtggatgtacaccctgtgatattattcacaaaatctaaaagatattactcctaatatcaccgtgggcgtacaccctgtgatattattcataatatctaaaagatattactcctaatatcaccatggatgtacaccctatggtgttatttataatatctaaaagatactactcctaatatcaccatgggtgtacaccctatggtgttatttataatatctaaaagatattacttctaatatcaacgtggatgtacaccctgtgatactattgaagatatctaaaagatattcctcctaataaaaacgtggatgtacactctgtgatattattcacaatatctaaaagatattactcctaatatcaccgtgggtgtacaccctgtgatattatttacaatatctaaaagacattactcctaatatcaccgtgagtgtacaccctgtgatactattgacaatatctaaaaggtattcctcctaacaaaaccatggatatacaccctgtggtattagtcacaatatctaaaagatattactcctaatactaccgggggtgtagacattgtgtgtacaaaatgtgacattactcataatatctaaaagatattgcttctaatatcaccgtgggtgtacactatgtgtgcacaccttgtgacattataacatctaaaatgtattactcctgatattaccgtgggtgtacaccctgtgttattattcataatatctaaagatattactcctaatatcaccgtgggtgtacaccctgtgatattattcataatatctaaaatatattactcctaatatcaccatgaaagtacatcctgtgtgtacaccctgtgatattattcataatatgtaaaagataatactcctaatatcattgtgggtgtataccctatgatgatattattcataatatctcaaagacattactcctaatatcacagtgtgtgtacaccctgtgatgacgttattcataatatctgaaagatattactcctaataacactgtggatgtacaccctgtgtttacaccctgtgatattattcataatatctaaaatatattactcctaatatcaccgagggtgtacaccctgtaatctaattcacaatatctaagagatgttactcataatatcaccgtggatgtgcaccatgtgggtacaccatgtgatattattcattatatctaaaagatattcctgctaatattacccttggtgtgcaacctgtgatattattcataatacctaaaagatattactcctaatataagcgctggtgtacacactgtgatattattcatactatctgaaagatattactactaatgtgaccatgggtgttcacttagtggtgttatttataatatctaaaagatattactcctaaaatcatcgtgggtgtctactctgtgatgttattcacaatacataaaagatattgtaatatcaccataggtgtaggcgttgtgtgtacaccctgtgatattattcataatatctaaaagaaattactactaatatcaccatgggtgtccaccctgtgatattatttataatacgtaaaagatattacttataatatcacagtgggtgaagacgctgtgtgtacaccctgtgatattattcataatatctggaagatgttactcctaatatcaccgtgggcatacaccctgtgatgttattcataataaaagatattactcctaatatcacagtgggtcaacacctggtgatattatttgtaatatctaagggagacattactcctaatatcacactggttgtacaacctgggtgtacacccagtgatattattcataatacctaagaaagatatatttgtaatatctaaaaaagatattactccatatatcaaagtgagtgtacatcctgtgatattatttataagatctaaagaagacagtacacctaatatctcagggggtatataccctgtgtgtaaacccagtgatattacttgtaatatctaagggagatattactcctaatatcacagtagatgtactccctttgtgtacaacctgtgatattatttgtaatatctaacggagctattactcataatatcacagttattctttgtaatatctaaggaatatattacctctaatatcacagtggctgtatatcctgtgtgtaaacccagtgatattattcgtaatatctaagggagaccttactcgtaatatcacagtgggtgtacactgtgtgtaaaccctgtaatattatttgtgaaatctaaggaagatattactcctaatatcacagtgggtgtacatcctgttatattattcataatatctaaaggagatattacctttaatatcacagtgggtgtacaggctgtgatattactcataatacctaagggagatatttctcctaatatcacagtggatgtacaccctgtgatattattcgtaatatgtaagggagatattacacctcatatcacagtgggtgtacaccctgtgatattattcataaaatctaaaggagatgttactcataatatcacagtgggtgtacaccttgtgatattattcataatatctaaaagagatattacttctaatatcacggtgggtgtacaccttgtgatattatttgtaatatcctagggaactagttctattaatatcacagtggatgtacactctgtgatattattcaattatttgtaatatctaagagagatattactcttaatatcgcagtgggggtacaccctctgtgatattattcataatatccaaaggaggagataatattacctttaataatgcagtgggtgtacaccctctgtgatattattcataatataaaagaaaaaagatgatattactaccaatatcacaatgggtgaacatcctctgtaatattatttgtaatatcggagggaggagatgatattacctctaaaatctcagtagatgtacagctctctgatattatttgtaatatccaagggaggagatattactcctaatgtaacagtgggtgtacaccctttgtgatattattcataatattaaagggaggagatattacctgtaatatagcagtgggtgtacaccttctgtgatattattcataatatccaaaagaggagatgatattacctgtaatatcacagtgggtgtacactctccaaatattattcataatctcccatggaggagatgatattactcctaatatcactggaagtgtaaaccctctgtgatactattagtaatatttaaggggagagatattactcctaatattgtaaacatcctgtgtgtacaccctctgtgatattattcgtaatatccaaggggagagatgacattacttgtaatattgtaaacaccctgtgtatacatcccctgtgataatatttgtaatatccaagggaggaggtgatattactcctcatatcacaggggctgtacaccctctgtgattatattcgtaatatccaaggggagagatattacttgcaatatttaaacagtctgtgtgtacaccctctgtgattatattcgtaatatccaaggggaaaggtaatattactcctcacatcacaggggctgtacagcctctgtgatcatatacttaatatccgactggggattactcctcacatcaaaggggctctacaccctctgtgataatattcataatatacaaggggggaggtgatattgctgctcacatcgcaggggctgtacacactctgttataatattagtaatatccaaaaggggaggtgatattactcctcactatgcagggattgtacaccctctgcaataatatttgtaatatcaaagggcggaagtcatattactgctcacaatgcaggctctgtacaccttctgtgacattaggagtaatgtccaagggagaggtgatatcactccttacatcacagggggtgtacaccctctgtgatagtatttataatatcaaaaggggaaggtgacattactccttacatcgcagggggtgtacaacctatgtgatattattcgtaatatccaaaggaggtgatattactcctcacatagcagaagctgttcaccctctgtgatattattcataatatccaaggggggaggtgatattacttttcacatcgcagggggtgtgcatcccctgctatattattcataatatccaaggaaggatgtgatattactcctcacattgcaggtgctgtacactctctctgatagtattcataatatccaaaaggggaggtaatattcttcctaatatccagggagggagaagatattactcccaatatcacaggatgtgtacaacccccctgtgatattgtttttaatatcaagaggggacaggatgatattactcacaatatcgcagggagtatacaacccccatgtgatattgttcctaatatccacaggaggagagaatgacattacttccaacaactcacagtgtgtacaccccactgtgatattgttccttatattcaaatttggagaggatgatattactccaaatatcacagggggatgtacacccccgctgtgatatttttcctagtatctaggggggcagaggatgatattactcccaatattgcaggaggtatacacccccactgtgatattcttcctaatatccagacggggagatgatgatattgcttccaatatcacaggggttgtacaccgccctgtgatattgttcctaatatccagtgaaatagaggctgatattaggggaaagagtatgacattactgccaatattgcagggactgtacaccccgcctgcgatattgttcctaatagccagtgggagagaggatgatattactctcaatattgcaccccactgtcatattgttactaatatccagtggaagagaggatgatattactcttaatattgcaggggatgtacacccctctgtgatattgttcctaacatccagggggagaggataatattattcccaatatcataggtggtgtacaccccctccccatgattttgtttctaatatcgagaggggcagaagatgatattactcccaatatcgcaggggatgtacatcccccctgtgatattgttcctaatatccagggggggtggaggatattattactcccattattgcagggggtgtattccctccttgtgatattgctcctaatgtaatggagaggagacgacaatattactcccaatatcgcatggggtatactccccatgctgtgatattgttcctaatatccaggaacagagaagatgatattactccaaatatggcagggggtgtacacccccctgtgatattgttcttcatatccaggggaggagagaatattactcctaataccgcaggaaatgtacaacacccccccccatgatattgctcctaatatcgtgggtggagaggaggatattactccctgtaaagcaagaggtgtacatcccccttgtgatattgttaacaatattcagggggagacgatataatgtcaatatctcagggggtgtacacccctcgtgtgatattgttcctaatatccagtggaacagaggatgatattaatcccaatatcgaagggggtgtacatcctccctgtgatattgttccttatatgtagggggggagaggatgatattactcccaatatcgcagggggtgtacaccccccgtgtgatactgctcctaatatccaagagagggagtatgacattatcctcaatattgcaaggggtttacaccccctttgtgatattgttcctaatatatgcagggggagataataatattactccgaatatcataagggatgtacacaccccctgtgatattattcctaatattcatgaggggagaagatattactaccaatatcgcaggttgggggaataaccctttgtgatattgtttctaatatccacggaggaagaggatgatattaatcccaataccacagggagtgtacacccccctgtgatgttgttcttaatatccagaagtggagaggatgatactactttcaatgtcgcagggggtgtacacaaccctgtaatatagttcctaatatccgggaggggagaggatgatattactcccaatatcacagtcggtgtacaaccccctgtgatattgtttctaatatccagggtggggagaggatgatattacacccaatatcgaagggggtgtaaacctcctctgtgatattgtttctaacatacagctggagagagaataatattactccaaatatcacagggggtgtacgtcctccctgtgatattgatcataatatccaggtgggaagaggatgatagtacccccaatatcgcagggggtgtacacccccggtttgatattgttcctaatatccaagggggtagaagatattactgtcaatatcgcagggggtgtacaccctgctgtgacattgtttttaatatccagaaggggagacaatattacgcccaatagcatagggggtgtacacccccgtgagatattgttcctaatatcaagggggggagaggatgatattactcccaatatcagagaaggtgtacacccaccctgtaatatagttcctaatatccatggggaaagtggatgatgttacttccaatgtcgcaggggttgtacaccacccctgtgatattgtttctaatatccagagggagagaggatgatattattttcaatatcgcaggggatgtataccctccttgtaatagtcttcctaatatccaaagtgggtgatgacaatattactccaaatagggcagggggtgtataccccccggtgatatttttcctaatatccagaaaagaataggaagatattatttccaatatcacagggtgtgtacatccccctgcgatattgtttctaatatccacaggggagaggatgatatcactatatcgcagggggtgtacattcccctttttatattaatatatccaaaaggggagatgattatattactgtcaatatcatagcaggtgtacaccacccgtgtgatatttttcctaatatccagtggaagagagaatattaatcccaatatcaaaggaggtgtaaaccccttctgtgatattgttcctaatatccaagggaagagaggataatattactttcaatatctcagggggtgtaccccccctctgtaatattgttcctattatccagtgggggagaggttgatattactgggggagtacacacaccctgtggtatttttcctaatatccagggggaagaggattatattactcccaatatcgcagggagtgtataccccctttgtgatattgttcctaatatttagtggggataggatgatattactcccaatatggcaaagcgtgtacacaccccctgtgatattgcttctaatatcaaaggagaagaaaattgtattattcccaatatcgcaggaggtgtacacaccccttgtggtactgttcctaatatccaatggggaagacaataatattactgtcaatatcacaggtggagtataccttccctgtgatattgttcctaatgtccagagggaaagagaatgatatgacttccaatatcgaaaagacggtacactcccccgtgatattgttcctactatccagtagggaagaggatgatatcactcccaatatcgcagggggtgtgaaccctccttgtgatattgttcctaatatccagggcgggagatgacaatattaatctcaatatagcaaggttgtacaccccagtgtgatatttttttcaatatccaggagaaaagaggatgatattactcttaatatctcaggggttgtacacctccctgtgatactgttcttagcatccagtgggaaagaggatgatattattcccaataccgcagggagtgttcacccccctgtgatattgttcgtaatatccaggaaagagaggatgatattacttcccatatcacagaaggtgtacaccccacttgtgatattgttaataatttgcaggtggggagacaattatattactgtcaatatcacagggtgtacattccccatgtgatattacctctaatatccagtggaagagagaatgatattaatcccaatatcaaagaaagtgtacacacactctgtgattttgttcataatatccagagaaggagaggatgacattactcccaatatcgcagggggtgtccaccccctttgtaggtgttcttccttcctaatacccaggagtgaagagtataacattattctcaatatcgcagggggtgtacacccccagtgtgatattcttcctaatatacaagggtggagaggataacactactcccaatatcgtagaagttgtacacccccactgtgatattgttcctaatactcaggttaggagaggatattactcccaatatctcaaggaatgtacaccttgcctgtgatattgttcttaatatccactgggaaagatgatgctattactcccaatgtcgcagaaggtgtacaacacccctgtgatattgtttctaatatgtagggggggaggaaatgatattgctcccaatagtgtgagaagtgtacaccccccatgtgatattgttcctagtatccagagggggagaggatgatattactcccaatatcgcagggggtgtacaacccccagtgagattgttcctaatatccaggaagtagaggatattaccaccaatatcgcagttggtgtacaccccctctgtaacattgttcctaatttccagtgggggagaaaatattactcaatatcgagggggtgtacaccctccctgtgatattgttcctaatatccagagagagagaggatgatattactcccaatatcacagagcgtgtacacccccccaccgtgatattgttcctaatatctgggagcgggggaaatgatgatatactgccaatattgcaggggtgtacaccacccctgtgatattgtttataatatccaggggggagaggatgatattgctcccaatatcgcagagggtgtacacacacccctgtgatagtcttcctaatatccagaagaggacaggatgatattactttcaaaatcgcaggggttgtacacatccctgtggtactgtttttaatatcaagggaaggagaggatgatattaccccaatattgaagggggtgtacaccctccattgatattgttcctgatctccaggggaaaagaggatattactttcaatattgaagggggtgtacacccccgtgatattgttcctaatatccagggaggagaggaaaatattactcccaatatcgcagggggtgtatacctcccctgtgatacagttcctaatatccaggttgggagaggatgatatttcttccaatatcgcagaaggtgtacacctcccctgtgatattgtttctaatatccagggagggaaaagatgatattactcccaatatcgcagggcatgtacatcccccttcgatgttattcctaatatcctgggtaggagaggatgttattattcccaatatcccaaagggtgtacactcccactgtgatattgtttgtcatatccacaggtggagagaatgacattattcccaatatcgcagagggtgtacaccctcactatgatattgcttttaatatccagaaggggagaggatattactcccaatatcggagggggtgaccacccactctctgatattatttctaatacccagaaagggagaggatgatattactcccaatatcacagggaggttatatttcccttgtgatattgtttttaatatccaaggggggaggcgatgataatactgtcaaaatcgcagggggtgtaccccccaccccgtgatattgttccttatatgcaggggggaaagaggatgatattactcgcaatattgcaggaggtgtacaccccaccccatgatattgtttctaatatttaggtggggagaggattatattactctcaatatcacaaggggtatacaccctcccccatgatattgttccaaatatccagatggggaaaggatgatattactcccaatatcgcagaaggtgtacaccacccctgtgatattgtccctaataattatggtaggagaggatgatgttactcccaatatcggagagggtgtacaacccccatgtgattttgttcctaatatccaggagaagagaggacaatattacttccattatcacaggggttgtacgcccccactgtgatattgttcttaatatccaggaaaaaaggggatgatattactcccaatatcacagggggtgtacacctgcactgtgatattataactaatgtccagggtaggagaggatgatattacttccaatatcgcagggggtgtacacccccccgtgatactgttcctaatattaaggatgggagaagatgatactatgcccaatatcgcagagaatgtacacctcgccccccgtgatattgtttctaatatccagggggaagaggatgatattattcccaatattgcagggggtataaaccccacttgagacatttcctaatatccagggggagaaaggatgacattactcccaatagcgcagggggtgtacacccctactttgacattgtggttaatatcagggaaagagaggatgatgttaaccccaatatcgcagggagtgtacacccaccctgtgatattgtttttaatattggggggggagacaatattactcccagttttgcaaaaggtgtacacacatccagggtggtagaggatgatattacttccaatattgcagggtatcctccttctgatattgctcctaatatccagaaagggagacgacaatattattcgcaatatcgcagagggagtacactcccctatcatatcggtgtactttttttttgtggggcagaggggcgggaaatggagtctaactgtgtcgcccaggctggaatgctgtggcacaatttcagctcactgcaacctccacctcccaggttcaagcaactgtcccacctcagcctctccgagtagctgggaccacatgcacacaccatcagacccggctaatttgtttttcatttttagtagagacagggtttcaccatattggccaggctggtctcaaactcctgacctcaagtgatctgcatgcctcaacctcccaaagtgctgggatcacagccgtgagccaccgtgactggccccaacttcattttctttaaatggccatacacctgataatggtgggacagcagactgaaatcaaaatgttataaatcttttaacttccatttctcttaacaggtggctgacctgtccattgtatccactctcagagtttatgccttgggtagaaaaatgccactttcctaacgatgaaggagagtgtgagtaggacaagagtccactcttcttgtacttggctcatgggacatacttggctgggttcgtgcatttattcattcacacatttacctagcttctccaaatgccaagcaagttaacaggtgctggtataacagatcctcacaatagagctagacagcactgctgcagatttgttccacacagcgagagaggaaacaggctttactgacatgggctacagcttgaggttacaaagaagaaaaaaacaaaatgtcatggccagacacagtggctcacacctgtaatcctagcatcttggtaggccaaggggagaggatagcttaatatcaggagttcaagaccagcccaggcaacatagtgagaccctgtctctaaaaataaataaataaataaataaataaataaataaataaataaataaataaagccgggcgtggttgtgtgggcctgtagtcccagctacttgggaggctgaggtgagaggatcacctgagcccatgaggtcgaggctgcagtgagttatgatcatgccattgcactccagcctgagcaacagagtgagaccctgtctcaaaaaaaaaaggtggggggtggagaaagggaaggaagagagggaaggagggagggagggaggacagaaggaaagaaggaaggaaggaaggaagggaaaaaaaaagtcactagtcttgcaccacaacgcttctaagtgtaaggctaatcttgtccatctgatctgagagcatggtcagagggacaaataaactctaaattttgtctaagccacaaagatcagccggctagattagctcctcccccttgctcttccgaggcccctgccctggggcggacaaatggagtctggggacctctccgtgggctggatccaatctccgatgctgctgcagcgccaaaatctcgacacattcacaacacgatgctagagacgggcagtcacttcaggaaagggagagagagggcaggtacaagggcaatggtaggcggagctttcccaagaagggtgcccaaccgagaaggcgttagaagctgcgttctttctccaggaggggatggacgaaagcaaagacccctgaccgtgactgcaggaactctgccaggcccttagaaaccggcggcgggccccgcccctgcgatcagaagccccgcaagctgggccccgccgccaactgcgtttccagccgctacggggccgacccctcctccgttctccgcactggggcgcacagctagcccacccaccctagggggcgcatggaaaccgcgtggtccgctgcgcgcacttcggagtctctgggcggctcggaggcctcatttcgatcgcggtccctccaggagccgccccggtccagagaaggataggatgtggactccccaagggaggactgcaggaagatggaacgggatttcttcacctgcccttcatcgcctaagtgggcctagactctaactggctgtcccttccgtgtcatcgccacggtccccatgtgaaccccgtttgtcctcccctcttcctgccctatgtcgcctccccccactccacctcctttcgtgaccactggccgggttgaccctgcggggcccgcgctcttcacccacaggccagcctgtcctcctctccctgtgtgcaccccaacatctcccagcttggcctggagcgtgtattaggttggtgcaaaagtaattgctgttttgcaattttttaaatggcaaaaccgcaattacttttgcaccacctataaataggcagggggaacgggcaagaaaagccttagagaaggggccaagagccaaccacctagccggccaggagtatgggtttgccagaggcatgagatgtattgaagcagaaaaggaagaaaaaagattaaggagacaaattgttcgtgataaggggtttcctgataaactcagaaacagcaactaccagttatggagcacttaaactgacactatctcattaatcctcacaacggtcctgtgcaggtggtggttttgttttttaccatcctaaatgccagagctgcacttggtatgtaacaaaggcagcatttgaaccctggcctgctcataccagagcgagggcatctaactgcacccacaaaggacaatggaggaagactgtgtcattgtaatatgagcaaatggggaaaagacaaaacaaatgctttcattatgcccaggttgtaaatgtataaacataaatgaaacacacatacaagaggctaaccgtttttgttttttgttgttgttgtttttttaaaggcaagagtctcactctgtcgcccaggctggagtgcagtggcgcaatctcgactcactgcaacctctgcttcccaggttctaagcgattctcctccttcagcctccagagtagctgggattacagcaccaccacgcctggctaattttgtatttttagtagagacggggtttcaccatgttggccaggctggtcttgaactcctgaccttgtgatccacccgcttcagcctcccaaagtgctgggattacaggcgtgggccaccacacccagccatagctaacagttttctaaaaacagagagtaaataggaagtgtccacaaaataaagctttaaatgtatgtagtttctttatttgtaaagggtgccatttgtttgaaatcgttcttacactcttggattaaaacaccggttccttcacacacttgtattttgaagggaatataaaatgtgattccctcacacctgtaatcccagcactttgggaggctgacgcgggtggattacctgaggtcagaagtttgagacaagcctggccaacatggtgaaactccgtccctacaaaaaatacaaaaattagccaggtgtgatggcaggtgcctgtagtcccagctactcaggaggctgaggcaggaaatacttaaacctgggaggcagaggttgcactgagccaagatcacatcactgcactccaccctgggcgagagagcaagattctgtttgaaaaaaaagaagaaaaaagtggtttcatatgatacaaatgttagaaaaaggacagatgtcagtttgctgactccagcagagttacctttcgggtgctagttcccaccacagcccaggatgccaatgttttctctagttacatgttaagatctccaaatccagggcatccctcctgaaacaatgccagtcctacactgctaaatgtttactgaatgaatggatgaatgaaggcaacatttttagatgtgggaatcctatagtgcttggttctctaatccctaggggcctcctttgaacttggttcttcaacctcctcagttgcccacatactacatcctacagtgaggcatttctccatacctcacttattacctggaaagtgccatactctcacatgcaggccttgacatgctagctcttttgctaaaactctccgtgcccctctccccgtgttccccacctgtcatctacttctatccacccttttgctcaggccaaaaacctaggaattttcccattaccactttgctccactgctataaccagaggtgatagtgactcttagcaaggatacatgcccaccagcaagttctggttatcagaaaaatattaagagtaaatttggtcacggtgtaatggaaatgcaaatctagtgatggcagcagcggtatcttgacaggacatatgaaatttgagagctttgacctgtgacctgccattgtcaaaactgtccaaccctgtttcagagcaggggtttgactagctccctaaaaaaatctcaggatattctctcctagtatcccagagagctctcggagcacttgagatcagttgcaaactaatgacagtgagtcatcagcgatgtactagggaatgaagagctatcaaacttctctgggttttgagatctgtgtaataccaacatcactttggggtatattgttgttttttgtttttttgtgttttcttgagacagagtctcactccggagtgcagtggcacaatctcggctcattgcaacctctgcctcccaggctcaagctattgttgcgcctcagcctcccaggtagctggaattataggcacgcaacaccatgcctggctaatttttctattttaagtagagactgggtttcgccacattggccaggctggtctccaactcctgacctcaagtgatctgcccgcctcagcctcccaaagtgttgagattacaggcgtgagccactgcacctggcctggggtatgtttactaaaatattcctttgtaaaatgaagctagctgctttgcagaattgagaataaagtttagatatgtacaaacatacgtgtgtgtaggtaggtggaaagacagaagataaaagtgccctctactatcgtatttctcttctctcccctttcaagaccaaaatgactcagaacacaaactcatgtatcaggccaattaaatatctgcttaaaggattgccctaaaggactattttgagtccgccttttttaaagtgttttacttatttaaaaaatatggctgggcacagcggctcacgcctgtaatcccagcactttgggaggctgaggcaggcagattacctgaggtcaggagtttgagaccagcctggccaacacagtgaaacccggtctctactaaaaatacaaaaatcagccaggcaaggtggcaggtgcctgtaatcccagctacttgggaggctgacacaagacaatcgtttgaacccaggaggcggaggttgcagtgagccgagatcacgctactgcactccagcctgggtgacagaacgagactgtctcaaaaaacaaacaaacaaacaaaaagttattcctagttctactgaaacctcgaactatttagtcttattttatataccaacaacttcccaatcaaatcccctttaagtcccaaacattcagcttttgttccagaggtctgtggaaaagcaagctttgttatcaatgcaaaggaaagtgatccattcttgctgtgaagcaagttccagggaggaaaggagttgcagccagagatgtgattccaacattcccaaacgcttctgtctgagaccttcagattttgtttgaaacaaattctcagaataccaaacacacctttattcaagtggaagtacaaaagcacattcctaaaccaaacgcatacatgtgatttttacatattctgctttttagggattacataatcctgtttcagtcaccatacgtgactactggtctctatacataagggtatacatgtttgacaggaaaaaacacatgcatttttcatttgcttttacatttagatcaattcatttatatatcaatttcatttagattcctaccttgccttgatgaaatcctactcttgctgatggcaaagaagtaaaatatagtggcagaactatcctagaggttagccataggaggattatagagtgagcaacatatttttatatatttgttgagggtccctactgaatattataacactgaactatgaaagcctcaattgctggactgacaacaagaattttaaataacatttgtcttactcacaaaatgttataaagcttaagatggaaaaatacaaaatgttttgacattacctaaagaatcatgaactcttgttaggtatatgatggtggccctgaacttgagccaacatctgtaatcacttttatcagtcaaaaagccatgttcttttatatagcctgtagactattaaaatacaaaaatgtggtaatggataaacaactatacacaaagccctcacacttcaaatactgtcctggattgatgagagaggagcagaattcaaacatttatctgcaatcctaatggttaaaattttaccaggaacagacctgccactctcttgaaatactgtctctgagattaacatacgaacagcatcatctctgttggaaggctacattcccttatgatgctgatttgtgtgtgtgtgtgtgtgtgtatggttttttgtttttgtttttttgtgtttttttgagagagagtcctgctctgtcgcccaggctggagtgcagtggtgcaatctcggctcactgcaacctccgcctcccaggttcaagcagttctcctgcctcagcctcctgagtagctgggattacaggcgcgtgccaccacacccggctaacttttgtatttttagtagagacggggtttcaccatgttggccaggatggtctcgactgcctgacctcgtgatccatccgcctcagcctcccaaagtgctgggattacaggtgtgagccaccatgcccggcctgtgtatcttctttatgtttaccctaccaagagcagacctgagcattttgctggccgtagaggtatataaaagaactctaagcttaggcatgcagaataggcactggatgaatgtagtgaggctattaggagtcttgttggctccctgatgtccttatcatgtcttcttcgcagactgtggatgcacacaagacagctaaaaccttgggcatcatttgaaaatgtttggctgcctgctacaatctcaggagagagaatccttcatacttatattggactggatatattgtcaatcaaattcttttttaaaaaaagatgcttcactttaggaaataagacaccagaccagcaacatcaagtaggtatggaatacttgctggtgaaacacttaaaactaggaaacttctaaatcttctaaaggtgcttaagagaatggagaagttaatcaacaggaatccaagtgttgtggctgtaaagcaatacgacataagatccctagtaaagagcaggcctaagagttggttttggaaagaacttgggccaagaacagcagaaaaagctaaatgagctacttacgtcgatgtgttttaatactggtgcattagcagtatcttatggaagttgtgaacactaagaaccaatttcaaaaaatataaaaatgtttatagggcatattaaaataaaaacagcttaaatgagttctataaataaaataggcccagcacagtgacacacgcctgtaaccccagcactttgggaggacaggtgggaggatcgcttgaggccaggagttcaagaccagcctgggcaacaaagcaagaccccatctctgttctttttaatatcaaaattataataaaaaagtaaaaataaacgtacctacttagaatacatattaaataaaggaactccatgagaaaatgtcactgcatttaccaagtcaaccctagatttttgtgcaatgaaaaagattgggactatgtattaacaatttcataaacaaataatcaacaattttctctccattatttcgatgttgggtaaagcctgaaatgtggtgtcgagtttttccatttgcgttacatcaaattcttgtctactatggatattctgatatgacaaagactagttaaactcctattgaaagatctgccatttactacacccaaataagttctcttaggtataaattctttgatgttgaatgagcgttgggttatgactgaatctcctcacacacatacatgcttattacatttataatctttttgcatggcgtgaatttgatactaaacaaggtagtttctttgactgatggctttttcacattcattgcagcaatggaattttattcccatgtgaattctccaaatgtgactaaggtatgaaaatactaatagcatgaaaaatttgccacattcaatacatttgtaagatttctcactggtatagatttgcaggagtcgattaagagtttaacactaataccttttcttcattcgtcacattcagagggtttctctctggtgtgaattatctgatgctgagcaatggctgagctatgactgaaggctttaccacatgcagtacatacatgatttctccctggtgtgaactctcagatgctgaatgaagcctgaatttgataaatatcttcccatcttcattacattcatgagttctctttggtatgaatgctctgatgttgaactagatgtgctctctgactggagttcttttcccatacatcacaatcaaaggctttctgtctggtgaggacttcttgttgcaggataagatctgagctatgactgaaactgccctcatactcattacattcatacgatttctctttcctatgcattttgtgatgctgaataaggcatgaggtttgactgaaagcttttccacattcattacattcatgtgctttctctcctgtgtgaattctttgatgctgaataagatgtgaattcaatctgaagtcttttccacattcactacacgtatagggcttttctctgaaatgaattccttgttgtttaatataggccaacccatattcatcatactcataggctttctcttcatgatggaccctctgatgttcaagtaggtatgaagtatggcagaagtcactgccacatacagtacacttacagggcatctctttgtgaattttctgatgttgagtaaggtggacactacgactgaagactctttcacaactgctacatttgtaagatttggctctggtgtgaattttcttatgctgaattatgcctgagcttggactacaggatttatcagacgcttcacaggatttatcagatgcttcacatttgtaaggtttttctctagtgtgtattcttttatgtcgactaagacttgagctctgactgaaagacttttcacattctttacatttgtagggcttctctctagtatggattctctgatgtctagtaagggctgagctctgatggaaaattttcccacatacatcacatttataggatttctcagtgttagggatgctctcccatttattaaggtgggagagatccattaagctttccttacattcactactctgaaaatcctctgttagatttaagtgttcatgtttaccagaggctgaattctggttgaagctcatgtcatacttatcattgtcatcggtattctgtattctaagaactctctgatctgcatcaatagtagagtccagactgaagcttttttcgggttcatgacattcattgttcttctcactggtgaaggtttccttgctgattgttatttgcctaaactctctctccaggtacagaaatttccttagaatttcctgaagtctttctaatctgtcctcagacttatacacttctctagtctcaggaacttgggtaatatcgtgtttgagtcttcctactctcactttgtatgaatgcacttcttccgaaattttctgcttaggaatcaacagcttgttctcttctctggtctctccatctgatacaatatataaatagaaaatgcaaatgtaatctgtaccctgtgcttaggaaaagaaaactcagatgagaaaactaaacaatgtagtatctacaaggacaagaaaagtttatttactctgaaaaacaggcacaaaatctcaacagcagaagttaagggcataaacaggagcagtgaggtaaaacagcggacatgttcagcagagtaaggaaataatagggaaacagctgaaagaattttagataagcaacttgattggggtctagtacgacatgtgcacggatactaaacaaatggaaagggtcaacctaactgaagggaaaaggaaggaactctccatgctaggacacacacagagctcttcattctgagtgccaaagcagctacaacttggctcaacaattgaactttacttccctactaattctatctgattctgccttactcacctgagcagtcatctcttaagacttctctagtcttagtttccagatcaaagacctgtagatcctgttccagctgggagatcccatcaggcttggaaattggaaatcctgctcatagagaaggaaatgggatgtggcaatgtatccccaggtcctacatctgccactttttcttttaactaatgattaagagagacagaaggtcgattctgagaagacattaattaggaaggtctggagagtgaagagggcaaagatctacaaggagctcagatttgtgctctagagggatgtgtgttaaggggcaagttgatgacttgggagcagaaggattcatttaaatattattcagacaacagaatgtgtgcatgggtttgtcttcacagaagttatcattatcactctccatctgttacctaaagattaatcttcggattagatctggtctacaagtatcaaaatggaggtcatcaaaatgtaattctgctggactggagaaaggtgaaactcaagcacctgctgcatggttagctaacctgtagcaagagaatcagtgaaaactgaataaatattctaaggaccaatctcaagaaacaatttgtttcagtacacataagaaaacaaagagtaatatgacacattcttacccattaggagtgtagcatttattcaacaaacatttatgaagtgcctcctctatgcaaagtatgcaggggataagaggccaagaaggtcccttccctcaaggacctcacactctacacagagacagctctaaacaactaactacaataaaatatagagagggaagtgcaatcagtgcatcttcacataaaacagtctttctatggcttgcataatgcaatgcttggatataaatctcttttaaagctaaagcaacaggcagtctgcttccaaggagacagaattttaatactattagtatcaaagggcagtttttaaatgtgtccagcccagaaagcttctaatagcacacatacaaggtctggctcaagcccctcatctccaaaaacctttctctccatttactgaatgtgtacaaaatttattagttgttccctcttatcctgacatgtcacatataacggtgtttacatagatttttttttaagtggtttcaggtattgtcattcatacttgatttataaactctttgatagaagggaccaggtatcttgtatcttgcaattcttttgattaatttacttaacggctacttattgagtgccaactctgtgcgcccaagtatcaatgtattaacagctacccaattttataaaaagggcattggggctggaaaatatgaagaactgacagctgccccaaagattccatgtgagagcctatgagcaaggagatcagaatagatagaagaaaggtatttactgtgtttctgaaatcctgtgggacatttagagtcaactctccttgtggacatatatttaattaaggtccaccctgtcaaatgaaatcgtttcagaagtttaaaaagtaaagttagtgtaacatgaagcagcaatcaatattgttctcagaattccaataacataatttgcaacttttaactctgagatatttaaagtgtctgtcgatatttggtaactgaaataaattctggctgcttactccatatctacacttaaaacacatatgcacaacaaaaaaggtggtcttcatgtgggatgaggggtttgattttagatgtgtgtttaatgtaatgtacgaaggtataagagaaaatgcccagcagatgagtacgcaaaggcatacagagtgataaaatggacttcagagactaagaagggaaagggtgggagaagggacaagggataaaaaactatatattaggtacaatgtacactattccagtgacaggtgcactaaaatctcagaattcaccactatgtattagaattcatccatgtaacaaaaaaccacttgtacgcccccaaaactactgaaataattttttttaaaagagaaaatgcctagcaggtaaagatacaatatcacagtttagaagagagaacagggtatcatcagtaccatcaaaatattattaagttttactaagtacttggtaggtgcaaagtaccatgccaagagctctctaggttttcactcatttaataccataaatttaaaacgtagaaactattattatagccattttacagatgggaatactaagattcagagtggttaagtagcttgcccaaggttacaataactggtaatgcttagttttcaaacctgcacagtcttatttcagaacctagcctttaaacaatctgctagtaaaaaaaaaattatgattttgcctcctaacaagccctgaaaaaaaataaataatgactgtgaacaaaatccatcccttcctccaaattacacacagaaagaacgtgtaagttttcttggcactagcctaaatgcctatttcctaaatttaactcaaaactttgctttcaaaatatgcacttgctttatttacatttttcctgtttaaaattaatgtattaaaactttttgattttatttaaatcttgagttttctaatatgatttataaaatattgacagtgaagtaaaaggtaaatacaaacaacagagaaaaagtgattagaataacatacggtgaaccaggatcctaaataattggagtcgcagaagtgttaattaaaagggatctatggctgggcacagaagctcacacctgtaatcccagcactttgggaggccatgacggacagatcacttcagcccaagagtctgagaccagcctgggcaacatagtgagatcccacctctacaaaaaatacaaaaattagccaggcatggtggcacacgcctgtagtcccagctacttgggaggcagaggcagaatgatcgcttgagctcagaaggccgaggctgcagagagccaagatcacaccactgtactccagcctgggtgagagtgagatcctgtcagtcagtcagtcagtcaatcaaccaacaaacgaatcaagaggatctatggaccaggcatggtggctcacacgtgtaatcccagcactttgagaggtcaaggcaggaggatctcatgagctcaggaatttgagacctgcttggggaacatagtgagactccatctctacaaaaaattaaaattaaaaattaaaagggatctaaaagatgatttattatcaaggaaatggaaatcctttacaataaaaatccaaaccccagccaggcacggtggctcgcgcctgtaatcctagcactttgggaggccaaggcaggcagatcacaaggtcaggagatcgagaccatcctggctaacacggtgaaaccctgtctctactaaaaataccaaaaattagccgggcgtgatggcgggtgcctgtagtcccagccactcgagagactgaggaaggagaatcgcttgaacccgggaggcagaggttgcagtgagccgagatcacgccactacactccagcctgggagactccatttcaaaaaaaaaaaaaaaaatccaaatccctagacaatagtccaaacaataataaatttgaggaaactccactataaataaataatttgaacacactcctgaaatttttatttgtattaaaaaatctggtctatggctcatatcgcttgctattctttccaaaatattaaagtaactagcacaaggcaggtacttaattttttttttttttttttggccggggggtatggagtctcgctctgtcgcccaggctggagtgcaatggcatgatcttggctcactgcaacctccacctcccgggttcaagcgattctccagcctcagcctcctgggtagctgcaatcacaggcatgtaccaccatgcccagctaatttttgtatttttagtagagacggggtttcaccatgttggtcaggctggtctcgaactcctgaccttgtgatccgcccacctcaccctcccaaagtgctggattacaggcgtgagccaccgcacccgacacaagccaggtacttatatgcataatctaattcaatcctgtacccagaaggtagacattatttttcatgttttataaaccaagaaaatgagtgtcagattaaataatttgctcaacatactacagctggtaagtggaacccaagcttgatcccagtttatattctttccaacctatcatactgcctatcaaagaaagcattagtagcaggttctcttgacattgacgtgaatgctttttttttttttttgagacggagttgcactctgtcacccaggctggagtgcaatggcacgatctcggctcacctcaactccacctcctgggttcaagtgattctcctgcctcagcctccagagtagctgggattacaggcatgcgccaccatgcccggctaattttgtatttttagtagagacggggtttctccatgttggtcaggctggtctcgaactcccaacctcaggtgatccgcctgccttggcctcccaaagtgctgggattacatgtgtgagccacagcacctggccgactctatgctttcaaaatatgcacttgctttacattttttccgtttaaaattaagttattaaaaccttttgattttaaggctggatgtggaacacatgaggccaagagttcaagaccagcctggccaacatggcaaaaccccatctctactaaaaatacaaaaattagctgggtatggtggtgcatgcctgtagtcccagctactctggaggctgaggcacaagaatggcttgggcctgagaggcggaggttgcagtgagctgacattgtgccaccacactccagcctgagcgacagagcaagactgtctccaaaaaaaaaattattttatttaaatcttgagagttttctaataaaatttattttaatctggtcttcaaaaataacagttaaagctgagcatggtgttggctcacatgtgtaatcccaggactctggggagctgaggcatgcagatcacttgagcccaggagttcaacagcctgggtaacatagcgaaacaccttctttactaaaaatagaaaaaaattagcatgatggtacaggcctatagtcccagctacccagaaggctgaggtaggaggatcacctgagcctggagggaagtccaggctgcagtgagctgttatcatgccactgtattctagcctgggcaacaagaggggaccctgcctcaaaaataatatttaaaatttgccttatcatatggtttgctgcttttactacggctatgcttttagccatctgaaagcttcacgcttttcttcctggtccttaatacacaaataatatctctccttagcaatatcattcttttgtagatacctgttggactggaatgtgtccctagagagttttactttttgaatgcatgtcctttctggtcccaaactatatactggcctgtctgtccaatttgtcatggcattttgaatttttcttgtcatcagagtacacacaactcactaaaaatattaaaaactccatgtgtagttgaacttattgtcctaagggcacaaagtagtgaaaaagtgcaggggcttcagaggcagatctgggtcccaagcctctcactgatcctgcaaagatcacttaacttctctgagcctcagtttcctcagatataaaataggagcagtgtcatctgctcacagggttatggtaaggattaaatgagatatatacacatatcctttatatatatatatacacacacacacacacacacatataaatgtcctatgtctgtgtgtgtgtatatacatatgtgtgtgtgtgtgtatacatacatatatatagtacccaataacatattggctgctcaataaatactaaatagctgtgacaatggaaaacattctgtgcaaaataactgtagtccttcatgacatcaagttaaaaaagcagagagtatgtgccaaacattcccaatctactgacccagttaatatcaattagaattttaacaagcatgcttctgaggccatcatctaatagggcacctgccacacttacccatgtgaaaagcaactcggtcccctttatgggtcttaatctaccacactaagtaacaggtaacttccctatggatagtgacccagaggcaaattgttcattcatcatcaatggagtatgttcttttttcaattatgtggtaacgaaaattacttattaccgacttctttactcagctatttgtactctgtatatttactgctgcatagtggaagcacttaagcaaaggaccaacgttctaatgtctgtgacaaatacaatctggaggccaggcgcagtggctcacaacctgtaatcccagcactttgggaggccgagacaggcggatcacgaggtcaggagatcgagaccatcctggctaagatggcaaaaccccatctctactaaaaatacgaaaagattagccaggcatggtggcgagcatctgtagtcccagctacttgggaggctgaggcaggagaatggcatgaagccgggaggtggagcttgcggtgagcagagatggtgccactgcactccagcctgggcaacagagcaagactccgtctcaaaaaaaaaaaaagtcttacaaccctaaaaagttaaattaataaatgtataaacttaacccagttatgctggaggttgcaatttttgttaaaaatcagaccttggcgatgaccttgagcagcgggacataaataattcccgcaagcttagtgttccaataatggaacactaggcataaatgggttaattttcagatgaagtctgctgaacccaaaaatatgaaaatgatttcccaaggattgtaaaaataactgctaaggagatgctgctaacttgatcacaaaagcaagatgagtagaaggctttcttgcactgtgcgtgtctcttgtatgtgtaaaagtgtgtatgcatgtcgactgcatgtcgagtgtgcagtgcagagataagagaggaaatgggataaagttcagtctatagcatactatgctattagactgcattaaactgctacaaagtttctttactccaaaaagtagacaggttaactgttggaaactctgtaattattagataaaattaacagtactttacaattatatgtatgtcactttacagtttacaaagttattaagtagatattcaatttgatgccctgaaataaatttaacttctttgccctcccttctcccctccatcaaggacagagtaaggaacacttaatcaggaaaggcaatataattgcatcaatctgtacagaaccacaaagaataaagggtaggaaggtaggaccttgaagagggccacagggacttcaaggaaggaggaaaccagaatgttaaacatgagggaagcccagggttcacaggagagttaggcaccatacggggcaggttgtgttcgccacataaaaggaggggcacacagcataagtttcacattctaaaataatatgaaaagaccataactgaagagctgaatttggaatttctggtttttcacaatacaagtagatgatgaccaccaaccatggtttctgaatgaactgggttcaaaacatatctggttgcaacagagggcttccttggaccctaacatttgaaattaaacagaggtaatttgaggagctgcgattttacacagtggtggcatcctggggagcttctattccatcagtcaattttaatatctcacaatcgtggaaaaggagtttccgagcagggacgagcaatatcgatgggaagccgatacttgggccatctcttggagattcctgctgtaaggacggcaagtgtttctccagagaaagcacttgcctgggtatgactcagggccgggcaggaattcacactatgaatccgggtggtgggaaggcggagaagtatgcctacaaagattaaagagccaggaatggaaaacacactaaaaaccgtcccagtgggcagcctgcctccccacaaataagaagaccttgaatcctgagcataatcagggagacaaagcaatgccctggatgccaccagcatagacaaagccaacggaaaaaaaaaaaagaaaagaaaatgcatgattcagtatttacacacacaaaaagaagagtgcagaagcaagcaagaaactaaagaaaaaggaggctgggtgcggtggctcatgcctgtaattccagcactttgggaggccaaggaaggtggatcacttgaggtcaagagttcgagatcagcctgaccagcatggtgaaaccccgtctctactaaaaatacaaaattaggcgggcgtggtggcccatgcctgtaatcccagctacttgggaggctgaggcaggagaatcgcttgaacctggaaggcagaggttgtagtgagttgagattgcaccactgcactccagcctgggcaacaagagtgaaactccatctaaaaataaaataaaataaaaaatataatataatataaaaaataaactaaagaaaaaggaacaatgctcacaccaagggagctgccgacaaaccccactgatgcttcccagcagcactacagcttggctaatcccagcttcccactgtacctttcaaaatgacaagggagagacatgagttaagcattgaccccacctcagcatggggtaaacatctgagatttctgctgccctgggtgtggttacgtgggattaccattctgggtgactcactgaaatgtactcacagtgagtcatgccttcaaatgacatctcaagttctgcctgcttggagatacatctggggatcttaaggggtgagggactactcaacaagaaggaatttagcctgtctttttaaataaacggcatttctttttcctagaaaaatgggaaattcttcaattctctaatacagggacactgagataacaaagaggaaagtgtctggttggaggttgggaggccaccctggggtctctcctacaaaaatggaaaagaaaagaacggtgagaaatcaagcaaagcacaagaaagtttccctttgctaaaagggaaaagatgccccacaatggccataaacatgaactggggataaggaggagaatgtctcttcttggcacccccaaacaaacgttaattacccctcccggagaagacgatgtgaaagataaggattcagaggttctaagtcctggaatctaagccacactctacagaccttctcagagaccttatacttaggaagaaacaagaaagtaaagaaattcaaatagataaaccgaataataaggaagtccttacccagtgagaccacgttcccataattctctaacatcacttctctgtagaggtccctctgaacagggtccaggtatccccattcctctcgagtaaggtgcacagccacatcctcgaatgtcacaaactcctgaaataacacatcctggctgctctgaggaatgagaacactgtagcaccatggccagagaatgaagatcatagagagggtatccactgtgtacttacgttgaggaggagggagaacagattagaacctacggaataaagcccataacccttaaacatctaataagcacccatcacacaaccatggacaaagagaaaacagagtttgctcatggcactggggagatgggaagttggtttatgtgaagtccaggtctccgaagaggatcaattcccaaactggagtctgctattgaaaaaaattccaggcaaggtctacagatgggatgagagagaggccacactccatcagtagcaatagtccctgaggaaaagcagagggttcctcagctcacctggtacctggctgtcaagagcgcagctgcctggtctcctgggcttccctcacggggaagagcaggcacctgaggaacaggtggagctgagggaggagaaaggagtgaagagtgagagcagccctttcccagggctccctttcagaggaggcctctccagcccaaggggtgtcagcaggaccctcctcaatactctagtaaaaccaatgaacatttttcaggtattgggtgtgtctactctgcttcgtctcagtacttgcatgccttatgcgtgttttgacctgtgatacaggattttcttaggaaagcttgtatttcactttatcttcatcacatgacagtcctcttacagaagagtaagactatacctgttttgcagatgggcaaagcaaagcataaagacttgtggggacttgtcctgggctagggttatttagcagacttctgaccctttccaggcactgttctagacacttgatcagcgtttctcttgtgaatgggtgctgtctcaaccagtgtgtaaggcccccaagaacaagaaagggtcatctgtttcctcgaaatcttttccacagtcccacaatcccccacagcactctacacattgtggcacttgatctgtgtgggtgacacacaagttatttcaggcactagagttaaccacaggcaatctaagacacagctcttataaaacaaaggaagaaaaagaccaacctacctatacgatacagcaaagtgtgactgcgtagtcaaaatacagtatatatacattcatacaggcattgtgttcaaccaaggaattaaatggttgcttccttgaccaaatttagtctagtcacaaaacactgcagttacaacagaatggatggcaggtgacaaagcaaagaaaaactaagtgaagggaacaggggaaagaaaggtcctgaacctaagaggaagtgagagccaggaaaggactgtgagatgtggcaaaagcagcatatcttagaaattattctggatgtgagaactgggatgaagtgaaggttgcctgaaggaaaaaccaccacagcgagtaagcagccatcactctgcttatttgagaaagatgagctatccttaataaaggggctcagactaggactgaactgagtcacatctgccccctctttcattcctccctctagggaccatgttcttattccagttcttggcctctctcaaaccaggcccaggagccccctcgggagcccctccgcactcccactctcccagacggaagtgctttctctgccttacccccagtgagtccctgttccatgtcggtgtcctgcacaaactgaggctctggggacagacactcagactgggtctccaaagactgaaactggacccttggtgaccctgctgcttcctgggctggtatttcctccatcactgctctggaggacaatgaccatcactgcaaggtaagattaagagaaattactgtaataagttaaagcatttcatcattttatatcgtcaggactttgcaaaggatcttacacactatggatattcaataaaaattagttgataatgattaaccaccctaaataagtaacagaaaaatggggccaggcgcagtggcctgtaatcccagcactttgggaggctgaggcgggaagatcacttgaggtcaggagttcaagaccagcctgatcaacatggtgcaacttcttctctactaaaaatacaaaaattagccagcgtggtggtgcgggtctgtaatcccagctattcgggaggctgaggcaggagaattgcttgaatacagaaggcatacgtggcagtgagccaagattgcaccactgcactccaacctgggcaacacagtgagactccgtcccaaaaaaaaaaaaaagaaaaaaaagaaaaagaaatatggatatgcttcagctttaaatacttaagaaccaaatcatagaagagtctctaatttggaatttgtggcattaaaaaaattaacacggtacaatttaatagtgtaaagctttctgtggaaactttaaaatatttaaaattggccacgtgcggtggctcaagcctgtaatcccaacagtttgggaggcacagacgggtggatcccttaagctcaggagttccagaccgtcctggacaacatggtgaaaccccgtccctacaaaaaaaaaaaaaaaaaaaaaaattaggtggcccaggcctgtagttccagctactccaaaggccaaggcaggagaatcgcttgagcttgggaggtagaggctgcagtgagctatgactgcgccactgcattccagcctgtatgacagcgtgacagcccacctcaaataaacaaaacaaaatatttaaaatttacaatcgtctttggaggctcaagttggtgcccagagaaaaatgctagttatgattgctcattttattttaattttgttttagcagagatgggagtctcgctatgttgcccaggctggactcgaacgcctggcctcaagcgatcctcccacttcggcctcccaaagtgcggggattacggcgtgaaccaccgtgacaggcccgcgtttacgtaaataaactcatttaaataaataaaacagcaggccccctaggaaatgtcttggtaacaccgtcagcccactccgatttactacacgggcttggcgaataaaactccacttttggggtcaggcccttcgctaactcagaccagctagaccggccttttcccggaatcctgagagcaacgcaggtaagagctgcggttcgaacaggtttgagcggcgtccttcaggcccaaggacgcatgagggtgccgtccccctcccaccaccctcgccctgggcccctgcccggctcccagctcggtcctcagaaggccttgcccggcgctgccctcctcccacttcccttttaggccaaggcaaagtcccaaaaggaccagtgaggacatacagaccagctcgcaccagggcacggtcgccggctcctgacggcggggccctcggtccgcgaggtgaatgaaccagggctgaagagaaacaggccctcctcgcacccgggcctccgcgcactctcggggaagcgaactaccgtcggccgcggccggacgccgcctccttctactcccgtgaaggcaaaacaagctgccaccccgctgcgaccccaaaacggcttccgggtactcaccgaggggaggggcgggcctggccgctgtcctgtcacctacacactcgcgctcggggccaccacagcctctcccgggccgctgtagacagccccgaggccggcgcttctcggtggcacttccggcgacggagtgcagggtcccgaatgagggccccccctcctccgcccaggcatgagggtcccggatgtgggtgagagccccggatgagggtcccggatgtgagtgagggccccggatgtgagtgacggccccggatgaggaactcggaggaggagctgggcccgcgcgtccatgattcgaaggctcgttttcgcagcttttccacgtctttttccggtcccactgccctccatgctaactcactgggcgtctctagccgttataccaacaatgactgcgaccagtgttgggaaagcgccccctgggcccctccctgacgccagcccatccttgagactccctgcaaggaggcggcccgacccagtgggtgcgtgtcgtggggtgaggaggaatggccgacctaatggtcccgcttccgtgagtagcacaggggtgcctgctcagagtgtagtacaacgctgacaagtagaaggcgaggattgcggggcctgggtgagatgggacccactaagttgtgggatcgaaatctcagtaggtccttggggaaagcggggacgggaggggagatgagcagattggaatagaaccgagagagacggaggaaactgacagttgcgtccctggtgggaagactaaaatctatgcagaaacagggataggcaaaagcattgtgcacaagcgggacaggcagagcgccgggacagaaacccttaggacattctgacaccttgctgaacctggatccttacagaatatgtcttgtaggtgaagctagatctgcaaggcataggcaagcctcttagagaatcagaaaagtgatttggaaggaacttcagctgttactactttgtttaagcaaatcaaatgctgttctttaatgttactggacgtttcaaattaaacacaagaaaacctgaagtgtggcattttatatattttttcaaaatgtatcagcttcttggagattctgatattcctttcctctctttatccctaagtatcatttatccaacctaaattcatactaggacacaatctctctagtctgcagtgcccgtcacagtggagtcaggatcggagaaagaaaatgcactgcttagtccatttcatgctggacagctccaattagaaacttttccttgtgttgaacagaaatacacccctggtgatgtctatctattgttcctgttgacaggtccccaggacaatagatgacacagtacttcttcctcttcataacggccattttaatatcctaggagagctaaaggtttggagttcttcctgagttgccatttccccacctagaacccttcacaggttgtacctattagcaatgtgatgggaaaccatttcagcagcaaaggtgagtgagctatggcagtgaggcacatcgcgtccaagttttagctgactcaggcaattggctccagtgagaggaccacaaaaggtacccacttaaagaggccacttcccaccagtactcatcaaaacataacaaagtgttaagaaacagcagctgctattttgcttttgagcaaaattttcttttaacagtttgccagatgacagaggtggaaacaactcaaaaaattgttaccttttttcgtttttgtctttttgttgttgttgagacagagtcttgctctgtcgcccaggctggagtgcagtggcgcgatctcagctcactgcaacctccagctcccaggttcaagcattttccctgcctcagcctccagagtagatgggattacaggtgggcaccaccacacctagctaatttttgtatttttagtagagatggggtttcaccatgttggccaggctggtctcaaactcctgacctcgggtgatccgcccgtcttggcctcccaaagtgctgggattacaggcgtgagccactgcaccgagcctgttttgttttttttagtgcaaattaacaaactgattctaaagtttatatagaaatgctaaggatttaggattgccaaaacaattttgaaaaagaataaaattggaatacttgtatttttttaagatttttttcctaaaggtacagtaatcaggatggtatggtatcagcatagagacaaatagatcaacagagcagaacagaaagtccagaaatatgaggttgaatttcttaaagaaaaaaaagtccagaaatagatctagatacatacaatagctgattttttataaattactaaggtaattctgcatctagctaagctgaaaattaggccgaggatctgtttgtaacagtgacagtaatgtaaaggagaccaattgtgcagactcggcaggtcccctgagtcaaagtcgtggctcatacagggagagggtgggatcctgagacctgttctctgtcacagtgtagtccgcaggaactttacccaaccatcatgatggtccatatattgatgacaaatgctagtagtacccagtgagcagcaagtgacaagggtcataaatatcctagtaagacttcttactaaggcagtacagaaacctgaagatatgggcacttatcaaatggatgaagttttggtggggcccagtggtttggggacatcacccaaaggtaaaagaaagttgttccaccttgcaccctctaatcccaaaaaaattggtacaggtcctggtgggcccctttggatttgggaggtagcatattctgcacctgagaaaactgttccaacacatgtattaggtgacctaaaaagcttccactttttatttattactatttttttttcttgacacggagtcttgctctgtagcccaggctggagtacagtgccgtgatctcggctcactgcaacctctgctttctggattcaagcaattctcctgcctcagcctccctagtagctgggattacaggcgcccgccaccatgcccagcatttttgtattttagtagtggaggggtttcaccatgttagccaggctgatcttgaactcctgacctcaagcaatccacccacctccgcctcccaaagtgctgggattacagacgtgagccaccatgcctggccagcttccactttttattggggcaagagagcactctatagtaaatccaagcaacagtgcaagcttacttgcaaattcagtggttccagaaatatccttgatggatacaggtgctgtatggagttgctggcaaaccccaataagagtgtgcattcgtgtgctagggctcctataacaaagtaccacaaactgggtggcttaaacaacagaaatctgttggttcacagtctggaggctagaagtcagaaattaaggtgtggttcctattgaggctgtgagaaggaatctgtccatgcctctctcctagtttctggggatttgctggatatattttgcattccttggcatcgtaagaagcattttcccagtctttaccctcatcttcatttggcattctccctgtgtactatctctaaacttcccttttttataaggataccagtcattagatgagggacccaccctaatccactatgacctcatcttgaagtaattacatctgcaatgcctctattgccaaataatttcacattctgaggtattaggggctagaacttcaacctgttaattggggatgaggtggaggtacaattcaacccatcataaagagtcacagcacaaatacctaagattctggagcaaggtcatgccttctaaggcaaaaaaacaaaacccacgtttccaaactcccaggtcagttacctctgctctactgccacctctcccataaacttactcctatggccttataaaagttccctacaactaactgatggagacagaagagccttggcctctgcacagattggggattgggtcagttcagcatgttggcatcttccagaaacagactgttcttcattacagccccactcgcgttgccctgaagcatactggtgaagaaaaattatctcagtgagcaatggtacatttggtcacccatgccatattttggaggaggtagcctaaggtagggatatgcattgactcctaggcagtgatgaatggcttggcttgttggttagggaccatcttattgtttatgcaataggcttatgaacagagaccatggtagcagggatagaggctgtgcgtggtcccaacaatatgggctacctcttatttttcttttttttttttttttttttttgagacggagtctcgccctgttgcccaggctggagtgcagtggtgtgatctcagctcactgcagcctccacctcccaggttcaagcaattctcctgcctcagcctcccgagtagctgggactacaggcacacaccaccgtacccaggtaatttctgtatttttagttgagacggtgtttcaccatgttgctcaggctggtctcgaactcctgaacttgtgatccacccacctcagcctcccaaagtgctgacattacaggtgtgagccaccgtgcccggccaatatggtctacctcttaccaaggctgatgtaactctcaccatggtggagtgtccagcctgccagcattagagaccaacactgagtcttagagataccagctaccaccaggttgagtgcatcagatcccttttaccttggaatgggcatcaatttgttcttaccagaattgatatatgctctaaatgagcttgtcttccccaactactttgcctccagcagcaccaccatctgagagcttacagggtgccttatccattgacatacctgaaactaaggaacccaccgatagccaaggaggtgtgacagtgaactcgaagctacaaaattcatggtgcatactcatcatccagaagcagctagccagatagggttttggaatggcctgttgaagactgggctaaattgcgattaagatgtaatgccttgcaaagttgggagcagttcttcagaatatggtatatgcgctgaaatgcattgggccaaaatggatatatagtattgtgtctccagtaggactatgtgcatacaggagtagcctctattactatcacacccagccactcacctgtagaatttgtgcctcctcgctccgaaatctggagccagctgggttatgatcctcatttccaggaagaacatttcctctaggaaacattaaatcgtgccactgaactgaaaacagaataccaccaggccactttgagtttcttgtgccagtaggtccgtaggcaaagaaaggagtcgttatagagatgcctacaattcctgccacacacacaacataaatacaaaatcatatacccagtcaactgcattcagtaatctgccttcctggaccctttaggcacttcagtgtaggaatggggacgggtggggaggagagactttagacaaagaagaaaaatacagtgtgtagcaatgtaatgactcttagcgatgacttggaaccctggaaggaaatatgaggatgtatctggaggaataagttgagactatgatgtcatcacggaggactgtaggttagaaagccagccagtgataaaggagcaaagattggatttgacggtgccctaggaggaaaaaaaaaaaaaaaaaaatatatatatatatatatatatatatatatgtgtgtgtatatatatatatgtgtgtgtatatatatatacatgtatatatatgtgtatatatatgtgtgtgtatatatatgtgtgtatatatatatatggagcaaagatgcacttaagtggattattgagaagactcgtgggtaggtagaaaatggcaaccatagcaagatcaaaccccctaaggaatggagcattagtgagggtctagaaggtaattcgggataccacgtaatcataggctctgtatcaggtagccgttccttttgtaggcttttatcttattgggctgtaccacagacttgcccagaacttttagagtcatgccccagccattcaaggtctcagttactgttttataaaaggtgaagttattcttgatctaatcatagaagccctaattattacaataacacttggacagcaaaaacgcctcaaattcaacttatttcaccgttgctaatctgaaaactccctggaaacataaggcaaactcagaattttataactatctagtgttggaaagaacgtctgttgcctatagatcaagtatttgaaaatactgcccattcaactggcaatacgtacataatcagcgtctcaagagacaatcccttcgatttgtgaaaccatttattcttgatcttcctgtctccaccctcgtttcattcagctcctctgccacagacaatcactatttttattgtaactattacaattattgtcatcaagaaaaatagaaggaacatataaatatctgagcagggcggtataaagggaaattcatccctttttccccgccctgtgcacctcctcggagcggacaagctgaggagcaagatccccaaacccgagattagagccctacacagggatgcaaagtcctcccgcgatcctagagaggaccccgaagcggagcgcagctccggaaggcgggtgtgacgcacttccggcttttgtgacgctttccctgggctctgaaggccagggggcttggatgtgagtctagtgctcctggtccccaaagtcacaaccccttctatcccagcatcccagacttctccgggcggggacagagttggacgtgcatggctgtgtcctgcaatcccctcgccacgaccgcccgggacggagtggaagcgggtccgtgcccccgttcctcgcgccagcctcggcggtggcaagcgctgtcccccagcagaggtgtccctggatacaggtgggaagggaacgaagttttggtttccggattggagacacccctgggactggagagaggcggtctgcgtgtcccttctggacccccagtcctggtgttttaccccaaagacgcgcggacaaaatgaccccagtcagatatctgtgctccccagttgtgcccactggtttttcttgtggtgggggcttttctggtttcctgggtaccccgagttgtaaaattctggcgatcttacacgataccaagtgccattggccttataatttgttttattcggatgggctcgttaagccagtgtccgcggatgatatgttcaccctcaaacccagtaccattatggtggtgattagagtgaaggccgggcgcagtggctcacgcccataatcccagcactttgggaagcctaggcaggcgaatcgtttgaggccaggagttctgagatcagccttgccaacctagagaaaccctgtctctactagaaatacagaaaattagacgtggcggcacacgcctgtaatcccagctgcttgggaggctgaggcaggggaatcgcttgaacccgggaggcggaggttgcagtgagccaggatcgcgtcactgcactccagcctgggagacagagagagagagtgagactctgtctcaaaaacaaaaaaagagaatgtttgaagcctactgaataaagaagtgatttggatataataggaaaagctcatttacacttcaccctttcctttcaagactttaggaaggggtctttttgtttctttggttggtttttttgtttttgagacagagtcgcccaggctggagtgcagtggtgcgatctcggctcactgcaacctccagcgcccgagttcaagcttctcctgcctcagcttcctgagtagctggaattacaggcgcctgccaccatgcccggctaatttttgtacttttagtagagacggggtttcgccatgttggccaggctgggaaaatgaactcctgacctcaggtgatccgcccgcctcggcctcccaaagtgctgcaattacaggggtcagccaccacgccctgccaggaagggttttaaatgagcaatttcggacatggggggttttcagttgtgggaggtatctatgcttgacatcgagggataaaggagagaagggaatttgtggacggtgcagcggaccattggggactggtaccagttctgccattgatgttcttggatgaaacacatagacccaccaagtctcaaatgtgtcctaagtaaagtaaaatagattatctcaaggtctcttccaattttggaatctgccgatagactgaatttaacattcagctaagcaaaacctatggccccacattcatttccatttgtgccaccaacatacagaaagttacttgcattattgagagaggctaagtgacacagtaccaaagaaaaggggttcgttggccaggtgctgtggctcaggcttgtaatcccagcactttgggaggccgaggtgggtggatcacgaggtcaggagtttgagactagcctggccaacacagtgaaaccccgtatctactaaaaagacaaaaattagctgggcctggtgttgggcgcctataatcccagctactcgggaggctgaggcggaagaatcacttgaaccctggaggcggaggttgcagtgagctgagatcgtgccactgcagtccagcctcagcaacagagctagactccgtctcaaaaaaaaaaggggggggttcatttagtaaagtcaggtaataactttttttaagtttttttttattatttacttttttttattatactttaagttctagggtacatgtgcacaatgtgcaggttagttacatatgtatacatgtgccatgttggtgtgctgcacccgttaactcatcatttacattaggtatatctcctaatgctatccctccccacttcccccaccccatgacaggccccactgtgtgatgttccccaccctgtgtccaagtgttctcattgttcagttcccacctgtgaatgagaacatgcagtgtttggttttctgtccttgcgatagtttgctcagaatgatggtttccaacttcatccatgtccctacaaaggacataaactcatccttttttatggctgcatagtattccatggtgtatatgtgccacattttcttaatccagtctatcattgatggatgtttgggttggttccaagtctttgctattgtgaatagtgccgcaataaacatacatgtgcatgtgtctttatagcagcatgatttataatcctttgggtatatacccagtaatgggatggctgggtcaaatggtatttctagttctagatctttgaggaatcgccacactgtcttccacagtggttgaactagtttacagtcccaccaacaacgtaaaagtattcctatttctccacatcctctccggcacctgttgtttcctaagtcaggtaatatctttaaatccactaaactcacatgaatggtgaaatattgcagtgtactaaaagcaaacaaacaaatgagggtgttttgtcaatcgcatgtgttgtggaaatctcattctccctccagaataattcatggatctatgtaacatgaacatgtttcaatattcataatactgaataattatgcagcttaatttcttatttttaagaaatacaagttctcatttttttccctatgccccagtggatcatcttgtgtaccctatgtaccctacctgatggttttttttgttttttgttttttgttttttttttttgagacagcgtcttgctcagttgcccaggcgtggtggcacatggcctgtaattccagctacttgggaggcagaggcaggagaatcactttaacctgggaagtggaggttgcagtgagccgagatcgtgcccttgcactccagcctgggcaacaagagcgaaactccatctcaaaaaaaaaaaaaaaaaaaagaatgaccagatcactttttagagttggcagtgtagcagcatatttaggacactcgcttcagacttggatttgagtgctggttctatacttactgtgggttgttagacacatttaatctttctgaacttttatttttcatctgtaatataagaatagtaattatgtgaacctcattaggtttccctgggtattaaatgagtggtgtatatagtacaccaaatctccctgacacacagccaacatgaatgacagttgctcatcatttaccatgtcacaccactagatttagtgaattgttttgtatgagttgttagcccagcaataccatgttgctttttaatactgctgttacgtttttctaccctgcaggatagcaaaacctgatctcataaaacctaggtcacaaaggacagccctgcaaaacagaccctatttggatcaagtgagccagttcctggaacctgaataatgactcctgaatcaagggatactacagatttgtctccagggggtacccaggagatggaaggcatcgtgatagtgaaggtggaggaggaagatgaagaagaccattttcaaaaggaaagaaacaaagtagagtcatcgccacaagttctcagtcgctctacaactatgaatgagagagccttattgtcatcgtatttagttgcatatagagtggcaaaagagaaaatggctcacacagcggctgaaaaaattatccttccagcatgtatggacatggtacggacaatttttgatgacaaatcagctgataaactaagaactatacctcttagtgataatacaatatctcgtcgaatctgtacgattgcaaaacatttggaagcaatgcttattacacggctgcagtccggtatagactttgcaatccaactcgatgagagcactgatattgcaagttgtcccacactcttggtttatgtcagatatgtgtggcaagatgattttgtagaggatctcttatgttgtttaaatttaaattcacatataactggattagatttatttactgaattagaaaactgccttcttggtcagtataaattaaactggaaacattgtaaaggaatttcaagtgatggaacagcaaatatgaccggaaaacacagcagacttactgaaaaattgttagaagcaacccacaacaatgctgtttggaatcactgttttattcatcgagaagctttggtatccaaagaaatttcaccaagtctgatggatgtattgaaaaatgcagtgaaaactgttaattttattaaaggaagctcactgaatagccgacttctcgaaatattttgttcagagattggagtgaaccacacccacttattgtttcatacagaagttcgttggctttctcaaggaaaagtattgagcagagtatatgaactcaggaacgagatttacatttttctcgttgaaaagcaatctcatttggcaaatatttttgaagacgacatttgggtaacaaaattggcatatttaagtgatatttttggcattcttaatgaattaagcctgaaaatgcaggggaaaaacaatgatatatttcagtatcttgaacatattctaggattccaaaagacgttattattgtggcaagcaagacttaaaagtaaccgccctagctactatatgtttccaacattattgcaacacatcgaagagaacattattaatgaagactgcttaaaagaaataaaattagagatattgttgcatctcacttctttgtctcaaacttttaattattactttccggaagagaaatttgaatcattaaaggaaaatatttggatgaaagatccatttgcttttcaaaacccagaatcaataattgagttaaacttggagcctgaagaagagaatgaattattgcagctcagttcatcattcacactaaagaattattataagatattaagtttatcagcattttggattaagattaaagatgactttccactgctaagtaggaagagtatattgctgttactaccattcacaactacatatttgtgtgaactaggattttcaatcttgacacggttaaaaacaaagaagagaaataggctcaatagtgcaccagatatgcgggtagcattatcttcatgtgttcctgactggaaggaacttatgaacagacaagcacacccatcacattaaatacaaactttacaaaattctgtgtatagccaggtgtggtggcttacgcctgtaatcccagcagtgggagaccgaggtgggcagatcacttgagttcaagaccagcctggccaacatggtgaaaccccatctctactaaaaatagaaaccttagccaggcgtggtggcacatgcctgcagtcccagttacttgggtgcctgaggcaggagaatctcttaaaccaggaaggcagagattgcagtgagctgagataatcccactgcattccagcctgggcaacagcgtgagacttcatctcaaaaaaaaaaaattgtatttgtacttttaaagggattttgcagtatgttgtagttaaacgttaataaaattatatttgtaattaggattttatttttctacatagtatgtttcatgaaactcatttcagttacatgaatgtgtgtatgtgtacaaggttattatataaaatatatgtcctgtgaattattgtcaagaattttgaaaactaagaggccagcacagtggctcacacctgtaatcccagcacttcgggaggccaaggtgggtggattgcttgtgcccaggagttttgagaccagcctgggcaacacattgaaatcccgtctctacaaaaaatacaaaaatttggccaggcttggtggtgtgcacctgtagtaccagctacttgggaggctgaggtgggaggatcacttgagcccagtaggtcgaggctacagtgagctgtgatcgtgcaactgcactctagtctgagcaacagagcaagaccctgtcttgaaaaaaaaattttttttaaatactgcttttttttttttttttttttttgaagacagagtttcactcttactgcccaagctggagtgcagcggcacaatcttggttcactgcaacctccgcctctggggttcaagcaattcttctgcctcagcctcccaagtagctgggattacaggcacgtgccaccatgcccagctaattttttttgtatttttagtagaaacagggtttcaccgtgttagccaggctagtctcaaactcctgacctcagatgatccacccacctcagcctcccaaagtgctgggattgcaggcatgagccaccaggcctggcctaaatagcgcttttaacacttacttttatactcaaatctgttcccctgtccaccgccatcgccttgcttcctcttttccatcagagccttgttgatgttctgttactccctgtctatgtgcttttccttttttgttctaattccaggaaatgagtcttttttttttttttttttttttgagatggagtttcactcttgttgcccaggctggagtgcagtggtgcaacctcggcttactacaatgtccacctcccggattcaaggggttctcctgcctcagcctcccgagtagctgggattacaggtgcccaccaccacacccggctaattttttgtatttttagtagagacggggtttcaccattttgatcagtctgttctcgaactcctgaccttaggtgatccacccacctcagcctcccaaagtgctgatattacaggcgtgagctaccacacaccaccggaagtgagtcttaatgccagtcttggtttaacaatatgctgggtttttttagatgggcatgtgttataattcagctaatgagacatttaggccatctatcgggatatttctgtgacttcccctgttctcaaaaaggatacaagaggccaggtgcagtggctcccacctgtaatctcagcactttgggaggccgaagcaggtggatcacttgatgtcaggagtttgagaccagcctggccaacatggtgaaaccccatctctactaaaaaaaaatacaaaaattagctgggtgtggtggtgtgtgcctgtaatctcagctacttgggaggctgaggcaggaaaatcgcttgaacctgagagggagaggttgcagtgagcagagattgtgccactgcactccagcctgggcaacagaacgagactctgtctcaaaaaaaaaaaaaaaaaaaaaggccagacacggtggctcacacccataatcccagcactttgggaggccaaggcgggcagatcatgaggtcaagagatagagaccatcctggctaacatggtgaaaccctgtctctactaaaaatacaaaaaagttagctgggtgtggtggcgcatgcctataatctcagctacttgggaggctgaggcaggagaattgcttgaacccgggaggcggaggttgcaatgagcggagatcacaccactgcactccagcctggcaacagagcgagactcctcaaaaaaaaaaaaaaaaaaaaaaaaaaaatcaggacacaagaaagaagatagtgatgatggtgatttgtttgtttgtttgtttgtttcagagagggtctaattccatcactcagctggaatgcactttgcaatcacggctcactgcagcctcctccaggctcaagtgatcttcctgcctcatagtttttatttttttgtagagacgggtctcactgtgttgcccaggctgtccttgaactcctggcctcaggtggtcctcctgcctcagcctccagaagtgctggaattacagacgtgagccactgagcctggcctgaaatccaatttttaatgttgcctcaaagataccgaaaacatagtgagggacaaatggcacgtctgttggacacatcagacagtggccatcgatttgctagtttagccattcactggggtacaaggtgaagcctgaagttttccaaacttcaaacttgaagttaaagtgcttctatccacttccaggggttggtgcccctgtgccagacagagcaaacgggaggtagctgctcttcaacccctttctccttttcctaggccctctgcagccccaccacacttggtccccacgctgaccggctaagggtgtgttgagcccgcctgaggcccaagccttccctctgcccagagctggggactcctggccaatgggcactccagctcacagaccctcggtattaggtggctccttcatagaccacggacagagcctgggctgcagaacagaacccacacccgggcgcaaaccacaactcagggctgcttcctgggatagcgaagaaaggctttgggagtgggcggaccgagggcgcagggcgcttctcctccaggtcctcggctcggccaccccggtccggcaaatggcggaacagacccagcctgcccttcactgagcgccactggttgctggtgcccctgcctcggccacagtcgcgatctcggaaaatccagagccagaactgtagttatacagaagactccagtgctccatacccaccctgggtggcaaggcctgcaggtgagcattgtgagcatgcggttggcgcctgcagtgaacacctccgtcccccatcctgggtgcctcgtgcgcacgccctacccaacagcctcgcccaggcgcgcgcggagtctggagcgtgggacacaagcaaaagggacggtgaggcacctggaccccgacccggagatgctgaaattagggtttttgacttgggacaggtggaattggagttagaaggtgagtgttagcagaaagtcccatagacaggagtcaggagacccaagttagtcgtgggactgtcactccctaaccgaagtggcctaagatttctgtgaggctatactttttttttctttcttttttttttttttggcggggcctggggtgggaggatggcagacagatcctttctctggtgcccaggttggcatgatcacaactcactgcagtctcaacctccaaggctcaagtgatcctcccaccacagcctcctgggactataggcgtatgccaccccactaattttggtatgttttgtagcaatggggtctcactgtgttgcccaggctgttcttgaactcctgggctcaagcagtcctcccacctcggcctcctaaagtgctaggattacaggcctgagccgctgtgcccagcccccagtctttttctaacactcttttctacatggatgaaaaatacctattgataaataaacacatatatgatagtacctacctaatgcagttactgtgtgaaataactgaattaatacatgtaatgcacttaggagactgcctgatgtttagtaagtgctacacaagtaataaataaatgttaaaagaggcttataaatgagtaatttcaattaaatgagggactgtagagaagactggcgaagaattaagcacaaaggtctttgtagaggaagtaaatacatggcaggctgtaaaatgatcattcacaagcagttcaggccaggtgtggtggctcacgcctgtaattccagcacttggggaggccaaagtgggaggatcagttgaggtcaggagttcaagaccagcctggccaacatggtgaaaccccatctctactgaaaataaaaaattagctggtcatggtggcaggcacctgtagtcccagctatttgggaggctgaggcaggagaatcacttgaacccaggaggcagaggtttcagtgagccaaaatcaagcccctgcactctagcctgggcgacagagcaagactccatctcaaaaaaaaaaaagttagccgagggctgtggcaggcacctgtaatcccggctacttgggaggccgaagtgggagaatcgcttgaacctgggaggcagaggttgcagtgagctgagatcatgcctctacactccagcctgggcaacagagactccatctcaaaaaaaaaaaaaaaaagaagcagtccatatgagcctatgaaaaacaccttgctcgggttgtttcgacagagtcacccaaagctaccttccttctagctttgcctttgagctctgtaaattacttcaaagaaacttacacttaatctaatgcaattgttcctgttattttttttcccggttccacaccctattttaagtctaacaccttcactttgtacttttgcctttggattctaatgtgaagaaggaaaaggccttcaatgcagaaaatggtgaaaaaaaaaatacctgccaggacattataaggagaaaccaaaaaataaactggccatggttttgcaaggtgggcaaagccaggaagaggagatcgggagagagaggtccgatgtgaagatgtgcacagagatgtctggaaaataagcccagaaaaaatagtcttcataacccatataggggaaagtggaaaaaaacttgggcagagttctaacgtggtgtgtcatcacaagacacatgccagagagaagccctaccagtgtaaagaatgtaggccaggcgcagtggcatcccagcactttgggaggtcaaggcaggtggatcacgaggtcaggagatcgaaaccaccctggctaacacggtgaaacccccgtctctactaaaaatacaaaaaaaatatccgggcatggtggcaggtgcctgtagtcctagctactcgagaggctgaggcaggagaatggcatgaacctgggaggcggagcttgcagtgagccaagatcgcaccactgcactccagcctgggtgacagagcgagactccgtctcaaaaaaaaaaaaaaaaaagaatgtaggaaaagctccagccagagcagagctgaaagtgcatacccaggagaggccccaaacatgtggcaagtgcaagaagagctttagttctggctcggacctcaccatgaattgcaccagggagaggtgatatcattgccttgactgtgagaacactttacatgcaccactgggatggtgcatggaagaatccacactgaaacaaaactgtaacatgtagtgagagtggcagaagcttcaggccaagctcagctctcatcaccaccaggtagctccactgaagagcaattccacccttacggcgagtgtgggaaaagcttcacgtcaagctcatgcttcactgtgcaccaagaatccgcctggggagagaccctacagtgtaatgggtgtgaaaaggcttccagcctcagcatgacatttgtggtagacagaagagaagccctgtaaatcctggaggtgggaaagtttgggccacagcattagcttaattttacattatagaatctacctgagagataaaccttacgagtgtcatgcatgggagaagagatttggtggagacctcatcttttaagatgccagaaaacccacatctcaggagtgacgtgacagagaaaagctctaaaagactaggtttctggccgggcacggtggctcacgcctgtaatcccagcactttgggagaccgaggcgggcggatcatgaggtcaagagatcgagaccatcctggctaacacagtgaaaccctgtctctactaaaagtacaaaaaattagctgggtgtggtggcgggtgtctgtagtcccagctactcgggaggctgaggcaggagaatggcatgaacccaggaggtggagcttgcagtgagccaagatcatgccactgcactccagcctgggcgacagtgcaagactccgtctcaaaaaaaaaaaaaaaaaaaaggactcggtttctgctggggtcagtggctatcacatgtaattccagcactttcagaggtcaaaatgggaggatcacttgaggccaggcgttcaagactagcctgagcaacatagcaagacctcaactctacaaaaaattttaaaaattaggaaggctcagtggtgcacccatagtccttgctattcaggaggctgaggcaagaggatcacctgagcccaggagttcaaggctgcagtgagctgtgattgtgccactgtactccagcctgggcaacagggaaagaccctgtctcgggaaaaaaaaaaaaaaaaaaagactagatttccttggtcataagcaacaatacccagcaaaggatagaaaccactattccaaagctgtgtgtcttgtgaataaaataccacatgagcgaagacatgtggtgttttccttcaccccagggttaattacatggtgttgaatagatagcccaggcaggggagagagtgtgtgttttcacttcccatgtcctatcttcacatgtcagccagtggaaaaaatactgagcaagggtcagggatgtcgagaccaagggaagattccctgataggaagggacataacccttgaaatataacagcgttatctaagccacaaatgctgattttagggtgacctctgagagttttctcttgacctccactcatcactctttggctttatttgctggccctggctaagcacgtgggctccctcagggaaatatcatcgaggttaacaatcatgcttaggtttttaagaaatacaagagttttctgtactagtactgaatgattattatgtagagaatgtatatcatcaaagcaaaagggaaaaaaataaggccgggcgtggtggctcatgcctgtaattccagcactttgggcagctgaggcaggtggatcacctgaggtcaggagttcaagaccagcctggcaaacatggtgaaaccccatctctaccaaaaaatacaaaaattagctgggcgtggtgatgggtgcctatagtcccagctactcgggaggctgaggcaggagaattgcttgaacccaggaagtggagattgcagtgagctgagatcatgccactgcactccagcctgggggacagagtgagaccctgtctcaaaaaacaggaaaaaaggtaattttcttccctcttttttattattactttgagctgccaaagtactttttttttctttttgcctactttctcatttgtagtgcagactctgtaaacctgccttttccccactctctaacatgccatccatgcctggtaatgctttggtgttctcttactttaggtatgattgttttcactacccccagtgctcctaatgcaattcccctcagccagtttttcctctatgtcccttcttttggaattttcagatagccctagtgggtccacagacattctgagattgtgcatcagactcaaaatatggacttttctgggggaaaggccagtggatttcaacagagtctaagaaggctaccttatccccaaaatgttaagaccaattgctttaggaagtctttaatgttcttatgggtttttcttcctaaagagacagcagtgccaggtgttagcagctcatgcctgtagtcccaacactttgggaggccgaagtgggctgaagtcagaggatcgcttgatctgttgcccaggagtttgagatgagcctaggcaacatggcaaaaccccatctctacgaaaatgcaaaaatcagccaggcacgatggtgtgcgcctatggacccagctactcaggaggctgaggtggaaggattgcttgaggtcaggagttaagagaccagccagggcaacatgtgagagcccgtctcctcacacaaaaaaattaaaaatgatggtgagcaccaagaatgatggtgagcacctgtagtccctgctgctcaggaggtcaaggtgggaggatcacttgagcccaggaagtcgagggtatagtgaaccatagtcacaccattgcactccagcctgggtgacagtgtgagactctgtcttaacaacaacaacaaaaaaagcagattttaatcatttccccctttttcacttttaacaaatggaaataactcaatgtaaaaattaactgtttcatattccaattgatcgccttagagctatactgttccatcggtgtcaggttcacgactacgccaactgtcatgcccagggtcaggttccaactcatgctgaggtccaaagggagtgagtggatgagcagatagctgaaaacactcagggggccgtaggcaggtgaaatgtagttttatttagcagctctcatcagcagctcacttacactagttctcttatactgtccgccttgtctcggctgcttagtcaggtggctcccacacacagctgtgcggctggctcttcaataccagctacttaggaggctgaggcaggagaatcgcttgaactcaggaggcagaggttgcagtgagccgagatcgcaccactgcactccagcctgggcgagagagtaagactccacctcaaaaaaaaaaaaaaatccttaatttgctaatattcacaaaggagaatacacttgtgcattcatttcccaggtctgctgtaacaaagtaccacaaactgggtggtttaaaacaataaaaatgtattgtctctcagtactggagtttagaagtcagaaactaaggtgtcagcaggtctatccctgaaacttgcaagggaaaccttggctcttcatagcttctggtggtttgctggcaatctttggcattccttggcttgcagctgcataaccccagtctctgcccttgccatcacgtgaccttctctcttgtgtgcctgtgtccacacagtcagcttctcataaggacatcagtcactggattaggggctcatcccatcccagtaagatcttgtctttttttttttttttttttgagacagaatctcactctgttgcccaggctggagtgcagtggcgcgatctcagctcgctgcaacctccgcctcccaggttcaagcgattctccctgcctcagcctccagagtagctgggttcaagcgattctccctgcctcagcctccagagtagctgggattacaggcgcccgccacgcccagctaagttttgtatttttagtagagtcgcggtttcaccatattggccaggctggtctcgaactcctgaactcaagtgatccacctgcctcggcctcccaaagtgctgggattacaggtatgagccaccatgcccgaccgagaccttgtcttaactaattatatctgctatggttctatctccaataaggtcacattctgaggtactaggggctgggacttcaataattccttctggctggggagaagtggagaacacagtttatgacaacttgtaatttgcacctatctaatcacaccaaacagatctgaaagagttgtcaaaaagaggctaatatcctgataagggacggccaatatgaatttatacgaaacatggtaagaaggggcatagtttggcttcaagccaaacttgaagtaaagtaggacttcatttttaaggaggcaaaaattcctgttgaaagtctttgctttcaccttcaccccaatggtttttttttttcttatttttctttttctttccttctttttttttttttgacggagtcttactctgtcgccccggctggagtgcagtggcatgatctcgactcactgcaacctctacctgccaggttcaagcgatcctcccacctcaccctcttgattagctggtaatacaggcgcctgccactacacccagctaattttttgtatttttagtagggatggagtttcaccacgttggccacacagtcagcttctcataaggacaccagtcactttggattaggggctcatcccatcccagtaagacctcatcttctttttttttttcatcagttcaagactgatggtcctcactctcgacctcaagtgatccacatgcctcggcctcccaaagtgctgcgattacaggcatgagccactgtgcctggcccaccccaatgttttaaagagactgggcacaatgctgcagaagaattctgaaacactattccattatttcatttatttatttatttatttgcaatagggtcttgctctgttgcccaggctagcgtgcagtggtgtgatcatagctcactgcagcctttaattcctgggctcaagtgatcctcccacctcagcttcccaagtaactaggtccagatgcatgcagcatcacacccaactaatctattttattttttgtagacggtggggcactggcagagtagggaggatctcactatgttgcccaggctgatcttgaattcctgggctcaagcaatcctcctgccttggcctctcaagatgctgggattacaggcatgagccacagtgcctggccttattctgcctattaaagacagcaccttttaatggctgttggtttaaagagtgtatgaaccaagcatgatggctcatgcctataatcccaacatttttaggaggcagagacaggagtattccttgatcccaggagttcaagaccagcctgggcaacatagtgagaccccatctctaccaaaaatagaaaataaatagcctggtgctgtggcccatgtctgtaatgccagcactttgggaggctgagacgggtggactgcttgagctcaggagtttgagaccagtccaggcaacatggcaaaaccctgtctctaccaaaaatacaaaaatgaaccacgtatggtggcacatgcctctggtcccagctacttgggaggctgaggtgggaggatcgctggcacccgggaagttgaggctgcagtgagctgtaatcatgccactccactccagcctgggtgacaaagcgagaccctgtctcaaaaaacaaaaaacaaacaaacaatggtccccatggccacatgcccactgctgcacctctggctgtaatgtgaatggtctggggtgatgttatataataaccagcccctgcaaaccaggatagccactaccaagcttctcagtgatgctgatggccccccaaccagggcattccttggaaccttggtaaacagaatgctctccagaccctcctaaggaacataactgaaggtgggttgcttggtcttatcttctagttccatcctagtttgtgtatgtatgaatctttggatccctttgttaagtctgccatggttttgtcatctctacgtcatttaatgtgggccactgacttttctaagctttcaagaatcactccaaggccaggtgcagtagctcatgcctgtaatcccaacatttgggaggccaaggctggaggatcacttgagcccaggagttcgagaccactctgggcagcatagggagataccatctctccaaaaaatgttttttttttttttttttttttttttagacactgtcgctctgtcaactgggctagagtgcagtggcgtgatctcagctcactgcaacctctgcctcccgggttcaagcgattctcctgcctcagcctctggagtagctgggactataggcatgcgccactatgcccagctaatttttgtattttaagtagagaccgggtttcaccatgttggttggccaggatggtttcgatctcttgacctcgtgatctgcccgcctcagcctcccaaagtgctgggtttataggcatgagccaccgcgcccagctaaagtatgttttttaaaaattagccactcatggtggcatgtgcctgtagtcccagctattcaggaggctgaggtggctagaccacttgagcccgggaggtcaaggctgcagtgagctgtgattgcaccactgcactctagcctgggcagcagagcaagaccctgtctataaaaaaattaaaaagctaccaagaaggtcctctgacacacacttggcattaaattggtggttatttgccctgtcattttcttctcttcaaggattcagtgactttcagcaagagccacccaattccataatctttattttcctgtttgtcccaaacctctacaagtcaatagatcgctttccacctgtatctcatcccagttccccacaagtgaatgacttagtgactggacaggtaccacatgccaggactattaacagtgatgcgggtcttcactccctcctggcgagtgaccaactccacaatccactctcacagcagcttcctatgaccacttgtggcaccaaatgtcttagatcaggttctctaaagcagagcctgagacagggattcagaaccatgtgattgacagtgtgatttatttgggaaacgcctttgagggagggaatgaaacaggatagagaagggagagagcttagcacggatgaaggctcagaaaaagtctagcttggcctgatccaagggtgccagagcagtcatagcaccctggagttttctccgctttaatcaaatgaaccaggtgttggggtgtagagaggaagtgactcctgggtgaggtgagatggctctcatctcctgagggcaattctccagtttctggagaacaagagctgtgagcacttgcagcccaaactcagagcagctggggatgggggtctcagcttggtagaggggactggacagggcaccacagtgtacaacacatatggtcaacaaatatttattgggcatttattgtaagccaggcaagtcagcagaaacggcctgagcagtgcccaagagcactcactcactctccctagcaaacaggctcagaactctctcacacatgtcatcctctttcccactcaaaactcccaccccaaccttcctggaaggcagggctaacaggacctcctgcctgcctgctcacgactgattactttcaatcccagctgcaatgcaaactgaaactcattctgtatatcaccactctacaggagaggtctatttctggggcacccagaagtcagcacacatactgctgggaccaggactcgtaattcgccttggtccaactccttctatgggtttagctgccctcattcctgtgggtaatacaagatcaaacagtccacaactttgcctgtcttctctgctcccctaaggtccctctcccttcgccgtaagatgtgactgaccagtacagtttctcctgaattgacaaactgaactactccttctaccggctaaaccctgacatcagtagaatcaaaccaaaaacaaggtagagtgtttcacagagaagtggtggattgaataaggcagcagaaacacataccatccagcccctgaacctgaattttgccaaaacagagatactttaagtccatttcttttcaaaggggttaatgctcaaagtgggaatagtgactagggtattctagtggttggaataataatttctagaaaaggttcattgctgaggtaccaaaacagacatcatgctaaggaattcttttactgtgcgcttccctgaatagatacgccgtcaaacaaggcagaagctacaaataaagcttacttctactgaactcatgaagctgttcctagtgtcagttttgagtttcaagtgaagactgaatgtcaactgcaggctttccgaattcctcgaccatgtccatccatggattctcttcttgtctagatttccaagcatgaagatgctaactaaagcatttctcaatggggaacacgaaaagatttctattattgtgggttctccggtgttcctaaaggctgagttataactaaaggatttcaacctatttgtgagtttgatggtaacgctggaaaaatgcttgaagttgttactttgctcattataggagtatggtttccctccaggaaggtttctctaaaattaagagctattctacaacagagacccctctacacttaaggtatttatgggatctgtcctctcatggcttctcaggtgtttaaagaggctacaactccagctgaaattcattccacattctttacattgaaaaggtttctcaccagtatggattctctgatgttgattaagatgtgacttcagagtgaagcctctgccacattcatgacattgatgggattttgtgctggagtagattttttgatgttgtttggtgtgggaacactggccaacattttctctacatatatcacattgatagggcttctctgctgtatgagttctgtaatgctgaatgaggtctgagctataaccaaaggcttttccacagatatcacactgataaggctgctcttgtaactcaatcttcttgtcttcaatcactgtcaagttccaactatatgcttcctcacagatgccatttttttcatttttctgacccatgtggagcacctgatgttcaattaggctaacgtactgaaaaaagatttccccacattcacgacactgatgggatttctctcgggagtggagtcgaagatgtccagccaggtgggaacgcctcccaaagcctttcccacattcgttacacttgaagggtctctccccactgtgcacgctctgatgctgaacaaggtgggacctcactctgaaggctttcccacataagggacaggtgtagggcttctcacctgtgtggacgcgctgatgctgagttaggtgcacgcgttggttgtagcttttcccacattcctcacacctgaatggtttctccccagtgtgtattctttgatgttgaataagatgtgcactctgaatgaagcttttcccacactcgttacatttatgtggtctctctccagtggaggattttttgtggacatatgggacttcactgtagttcatcctctttgaagatggttgtcctagtatctctttcatgggaattccctgctttctatccagcttgccttgaaactcacagccttctccaaaatcttgaacttgagaaacatttctttgggtttttccagatagttccatgtctgcttctgaatattctgaaattttcttcttaacacttaattttgtgttcttacttcttttgtcactgcctaaaaaaaataaagagcaagtgaaaatgtcatcagttcttttttttttttgagatggggtcttgctctgtcgcccaggctagagtgcaatgatgcgatctcggctcactgcaacctctgcctcctgggttcaagtgattctcctgcctcagcctctcaagtagctgagactacaggcgtgcatgaccacacccagctaatttttgtatgtttagtagagatggggttttgccatgttggccaggctggtctcaaactcctgactttgggtgatccacccgcctcagcctcccaaagtgctgggattacaggtttaagccaccgtgcctggcccatcagttcttttataaaggaaaaataaactgtcataaaaaatgttcatcagatgaaactatgatgtaacgggagtaacagaggtggatgtgtgtgtgtacttgatgccaacaggaatgtaaacaacaaacttttggaattttctgacgaaaagagcaagactcatccacaggatggcagaaaatatttgcaaactatgcatcagacaaaggactaatatccagaatctacaagtaactctaacaagtcaacaagaaaaaaaaaatcccatcaaaaagtaggcaaatgacatggagacagttctcaaaataatatatacaaatgaccaacaaacatgaaaaaaatgctgaacatcactaatcatcaggaaggtgcaaattaaagccacaataaggtactgccttactcctgcaagaatggccattattaagaagtcaaaaggccgggcgtggtggctcacacctgtaatcccagcactatgggaggccgaggcgggcagatcacctgaggtcaggagttcgaaaccagcctggccaacatggtgaaacccacatctctactaaaaatacaaaaattagctgggcatggtggcgggcgcctgtaatcccagctactcaggaggctgaggcaggagaatcgcttgaacccaggaggctgaggttgcagtgagccgagactgcgccattgcactccagcctgggcaacagcaagactccatctcaaaaaaaaaaaaaaaaaaaggccgggtgcaggtggctcacgcctgtaatcccagaactttgggaagccgaggtgggtggatcacgaggtcaggaattcaagaccagcctgaccaagacagtgaaaccccatctctactaaaaatacaaaaattagctgggcatggtggtgggtgccctgtaatcacagctactccagaggctgaggcagagaattgcttgaacccaagaggcagaggttgcagtgagccaagattgcgccactgcactccagcctgggcaacacagcgagactccatctcaaaaaaaacaaagaagtcaaaaaacaatagatgttggcatggatgtggtgaaaagggaacgcttatacattgctggtgagagataaattaatacaacttctgtggataacagtatggagacttcttcaagaaccagaagtagatctgccatttgatccagcaattccacaactgggtatatctacacaaaggaaaagacaatataccaaaaagactgtaagcgcctgtcttctgcagcacaattcacaactgcaaagatatggagccaatctaagtgcccgttgagcaatgagttgataaagaaaatgtagcaggctgggtgtggtgactcgtgcctataatcccagcactttgggaggctgaggcaggtggatcacctgaggtcaggagttcaagaccagcctgaccaacatggtaaaacctcatctctactaaacatacaaaaattagcaagggatcgtggtaggtgcctgtagtcccagctactcgggaggctgaggcagaagaatcgcctgaacccaggaggcagaagctgcagtgagttgagatcacatcactgcactccagcctgggtgacagagtgagactccatctcaaaaaagaaaaacaaaaaacaaatacataactgggtggtgagaactgacaaaaactggaagaatgagagtgaaggatgatgaagagggtatgcagtcagggaatatctgactaggagtcaggaaataaggcaaaatgagccaacaagaagcattgtcagagggtgggtgatacagcaatccctgcccccttcacccttagccaacattctagcctcagttttcctcccccggcatgtcatccttctcctttgggaatgctcatcacctttactatctgctacccccaccagaccatcggctgcatgagagcatggactgtatctctgttctggtcactgcagatcctgtgcaactagcaacacagactctcaataatatggctggatgtgcaaaacatgtattccccctttgatccagaaaaatgagggaggaccgggcatggtggctcacacctgtaactcctagcacttgtggaggccaaggctggaggatcgcttaagcctagaagttcaagaccagcctgggcaacagagccagaccccttctctacaaaaaatacataaattagctgggtgtggtggtgaacacttgtagtcccagctatgcaggaagctgaggtgggaggattagttcagcccaggaagtggaggctgcagtgagctgagatcccgctactttaccctagcctgtgtgacagagcaagaccctatctcaaaatacaaaaacgcccccgccccacaaaaaaaatgtggaaggcaagtgagtattcactgggaaactagccatagaaacaattgcagggaaggtagaaaacaaaagataactattttaaagcgattgctttttcaagtccaaagcgctattggtggattttccaaatgagggaatcatcgagtagaacgggaaaacactagctgagaggatagctcagctcaaacccagaactttaaagacactttactgacttctgtgccatggtggaagatgcagcgtggctgtaaacatcaaaggcagaattaaaaaaaaaaaaaaaaaaaagaaaaacattttggctggtcttagaatcatctgaagaatattagtaagggcctttaagttcacagcacagtttatgacgatctcattcacagataaatttactgtcatttgaacagatgtttaaaaatactggcccggcatggtagctcacacctataatcccagcactttgggaggccaaggcgggtggatcacttgaggtcaggagttcgagaccatcctggccaatatagtgaaaccccatctctactaaaaatacaaaaaaaaattagccaggtatggtggcaaatgcctgtaatctcagctactcaggaggctgaggcacgagaatcgcttgaacctgggaggcagaggttgcagtgagctgagatcgtgccattgcactccagcctgggcaacaagagtgaaactccgtctcaaaaaaagaaaagaaaagaaaaaaagaaaaagtcacaggcataaacagttatcgggacaaaagagaaaaaaattgaagttcaacaactgggaacacttgagtaaattacaatgccaccacacaatggcagactgtcagaaataaaaaggagggctgaacagccctggaaaatgtgtacgcttaatatttaattctgagtacgactacgtgaaacagacttataaaaaaaaaaggaaacatactaagtaataacagttctattagttagggtgatgtgattatgggtgatttattttttctttttattttctccaagcttcctgtactactgttattttattgggtttgtgtttgtttgttatttgagaagtctcactctgttagccagtctggagtgcagtggctattcacagacacatttatagctcactgtagtcttgaacttctgggctaagagatcctcccacctcagccttccgaggagctgcaactacaggcacatgccaccatgcccaggtaatttttaaatttttttgtagagacaaggtcttgctatgttgcccagggtggtcttgaatgcctggcctcaagtaatcctcctagctcagccgcctcccaaagcactgagattacaggtgtgagccactgtacccaggctattgttttaaaataagtaaaataactaaattgggaaaaggggaaagagagaaaagcatataagagagccaaatcctcatttactaccatagaaagtcaacagataacatttaaaattgatgagccaactaataatagttttattttaaaatacagaattaccagaaggaaccactaacagctgagagcacagccagcacagtggctcatgcctgtaatcccagcactttgggaggccaaggcaggcagatcgcctgaggtcaggagttcaaaaccagcctagccaacatggggaaaccctgtgtctactaaaaacacaaaaattacccgggcatgctggtgcgcgcctgttgtcccagctacttgggaggctgaggcaggagaatcgcttgaaccggggaggcagaagttgcagtgagctgagatctcgccactgcactccagcctgggcgacagagcgagactgtctcaaaaaataaatacataagaaccaaataaacgataacctttgcctcttcctaccccccccagtatcaccacccatctgtcctgttgtaccgtactaataaaacaccttttgcttttcgcctccatttatcccccggatataaactcctcacacgtacatctctgggatttctccctgaagtggcgttttaggtgttcgatcagatgcgaatggcgaccgaagttcttcccacactcattgcagccatagggcctctctccgctgtggacactgtggtgctgaaccaggtgggaactcacccggaaagcctttccgcacacctgacatttgtagggtttctcccctgtgtggacgcgctggtgctgggtgaggtgcacccgctgattgtagctcttcccacattctccgcacttaaacggtttttctccagtgtggatgcgccgatgctgaataaagtttgaggcttggaggaagaatttgccacaatcgctgcatctgtgccctctctcgccatgtgtgctttgcttagggctgatgtctgtgattgcatccagatcccttttctgggaaggattctgccttgatttccccacagtggggttgacctgccacctttgtaccatgcctttaaggtcactgacttctgcaaagtctggatcctgaggaacgctcctttcggtgtgttctggcgccacccagtgtgattcagagtcatcagaaatctgcttcactatgagctccatattgtccctggactcataacctgaaataacagagggagaattaaaaaatgagcttttccttgaatttgaagaaataaaatgaggggataatgaagagaaactgacatgtgctagggatccatgattctgtaaagggacttttacagtacagggatgggatgaaaaatattcaagcagaaaagtgagggaggttagggaaggaagagctggcaaaaaatgttcagaggaaggagactgaaaatcagtcattccactgaacgaagagggtctcctctcagtgtggcacttacaaatacctgtatcatgttaaatgttctcttgtgtgtgtgtgtgtgcgcgcgcgcgtgtatgtgtgtgttttgagacagggtctcactctgtcacccaggctggagtgcagtggggcaatcatggctcactgcatcctcaacctcttgggctcaagcgatcctcccacctcagcctcccaagtagctaggactacagttgcacaccaccatgctcagctaatttttatatttttgtagagatgagggtctcattatgttgcccatgctggtttcaaactcctgagctcaagtgatcctcccacctcagcttcccaaagtgctgggattacagacgtgagccaacgcgactgggcaatattcttttttttttttcttttgagacggagtctcactctgccacccaggctggagtgcagtggcgcgatctcggctgactgcaacctctgcctcccgggttcaagtgattcttctgcctcagcctcccaagtcactgggactacaggcgcacatcaccacgcccagctaatttttgtaattttagcagagacagggtgtcaccatattggccaggtggtctcgaactcctgacctagtgatctgcccgcctcggcctcccaaagtgctgggattacagacatgagccaccgcgcccagtcacgactgggcaatattcttaataaaactggatagcaggttatgcagctaaccccatcttcaccttcctcttcctgtgaattcatagcctagaaaagaaaggtgatctttctaggtttctcaatgcccaaaggatttcagtttggtatgaattaatctaaaagaaaaaagacattctttctatatcctgagaagaacctactactttcaagagctaggttaatgttcagcagtcactgatagaaccgtggatgtttcagtggctataattagttcctttgttcaactgtatcagcaagatactttactcaaaacactgatgttttaatatggtttgcagagacaaatcttcagtagttaacaaaaaatagagtattggccaggcacagtggctcatgcctgtaatcccagcactttgggaagccaaggcgggcggttcacttgaggccaggagttcgagaccagcctgaccaacacagcgaaaccccgtctctacaaaaaatacaaaaattatcagccgggtgtggtggctcacgcctgtaatcccagcactgtgggaggtcgaggtaggcggatcacttgaggtcaggagtttgaaaccagcctggccaacatgatgaaaacctgtctctactaaaaatacgaaaaaaattagccaggcgtcgtggcacacacctgtaatcccagctactcaggaggctgaggcacgagaatcgcttgaacccaggaggcagaggttgcagtgagttgagatcacaccactgcactccagtctgggtgacagagcgagactctgtcccaaaaaaaaaaaaaaaaacccagggagtatcatggcctattaagaatgtcccaagatgttttcatgaggagagttttctgtattatattagtaataagagctaaacatttgctgagtgctatgagtccagcactacactaagtactttacaattttatggtatatttaatccttacaatgacctttaagggagctaccataatccttttttgatatagtcagaagttataattcctaaactatgaagacaattttaattttaatttaccatatagctacttttacttaccttcctaaaaagacactgaaacagtaaaaacagggatataaacaaaaaaccctatcacaaaaccagactttttatgttttttcctccctcatttaactatgcagctaatcccagctaccatagtattttttttctcttttattcatatctactggtctcacacattgattgattgattgattgattgattgatttgagactgggtcttgctctgtcacccaggctggaacacagcagcacaatcacagcttactgttacttctaactccctggttgaagcgatcctcccacctcagcctctacaggcatgcaccaccacgcctagctaatttttgtatattttgtaagggtttgtctcactatgttgcccaggctggtctcgaactcctggcctcaagtgatcctccttccttggcctcccaaagtgctgagattacaggcatgagttcctgcgttcagcaggcagcctactcacttcctcctccccttgtctctcagtggagacatgtctctcgagccaaggtcagtccttcctccttcctgtaccccagatctcaccataccttcctgctttccagggatctcccaacatcagctaactgcccctccatttttttttttttttttttttttttttgagatagggtctcacattgtcacctaggctggagtgcaatggcatgatctcagctcactgcaaccttcacctcccggattcaagcaattctcctgcctcagctcctaagtagctgagagtacagatgcgtgccaccatgcccggataatttttgtatttttagtagagacaggtttttgccatgttgcccagactggtctcaaactcctggcctcaagtgatctgcccacctcagcctcccaaagtgctgggattacaggcatgagacaccacggcccagcctgtctgctcctccttgcctccatattctactctactagttcttctccagaagcatttaaatatgctgaaaatttctcccattaacaaaacatacgagccaggcatggtggctcacgcctgtaatcccagcactttggaaggtcgaggtggttggatcacctgaggtcaggagtttgagaccagcttggccaaggtggtgaaacctcatctctactaaaaacagaaaaattaggcggctgtggtggagggtgcctgtaatcccaaaattactcgggagctactcgggaggctgaggtgcgagaatagcttgaacccgggaggcagaggttgcagtgagccaagatcgtaccactgcactgctccctgggcaacagagcgagacactgtctcaaaaaaaaaaaaaggggaaacaaaaaacaatccacccatccaacccattactctttcagtgaccaggactctcttcccctttagagacaaagtccttacattcatctacaatagctttttcaaattccactcctttgcaatcttcaaagaaactatctcttgttccccaacacccctgccactccacggaaactgctgcctccaagactcatttacttatgttgtaaaaatctcacttccaaatctgatgggtactttctttgattttgacctctggtgatgctgttattaatagaaatccgcagatgtgaaaagaatctaacatggccttccgagagaagtaaaggaggcagaaaccactggccatgtaattaatgtagaatagtgtattgaagtgataaatacagatgttataatgaagagatagagaatgagaaaaacatcagaaactacacatttaaaactgcttagagaataccatagaaagaactatgccaagaacctcaaactctgaaatccattaggtacctataaagtaactgaaaaagataaagcaagagtaacaggctcaaataaacaagcaagctattggaaattaatttaaaaagaaaagaatttttaaaatttgcattaaatataacatttatactatatgagtaattcactgagctaaaaggccccatgaaaaatcaataatcataaaattattgatttaatcaataattttaaagcataaatttgatttttttccacaaaaattaaaacatcaaaataaaaaaagactaccaagatcccaatagattaatgaacagaggcatgcacaaataaatcaaaaagaggaaataaatataaataatatcaatagtaattaaaaattgaaaatttaaaagagcagagtcagctgtatacctgttaaataaaagcttgtgagtgaactaaaacggttaaacaatgtaaactgacataatgtttttcaaaagaaattttgcattgtgggcggggcatggtggctcacacctgttaatcccaacactttgggaggccaagctgggcagatcacgaggtcaggagtttgagaccagcctggccaatatggtgaaaccctgtctctactaaaaatacaaaaattagctgggcatggtggcacatgcctgtaaccccagctattcaggaggctgaggcaggagaattgctcgaaaccaggaggcagaggttgcagggagctgagattgcgccattgtactccagcctgggagacagagtgagactccatctcaaaaaaataaaataataaaataaatatattttgtagcgtgtatgtttgcatctgaagtcttccagtatgcctgatagagtggttcttctaaaagaatttactaaaaaaaggctaaaagctataatctccaaaatgtttgcaggagtgctgagatttttataactgctccagacagtacaattaaatattagcttccaggattataacttagttagaaatagggccagaaaattcaagaagcgatatgacaggtaaaatgtaggtgccaaggcgaacataataaaataggtatcagtgacttaagaatggtaatgaagtcctccaagtagctgggattataggcgcccgccaccacgcccggctgatttttgtatttgtagtagtgatggggtttcaccatgttggccaggctggtcttgaactcctgacctcaggtgatccacccgcctcagcctccggaagtgctgggattacaggcatgagctaccacacctggcaaaattatccaatctattaaacagtatagtaactaccaaaaatttgttaaagtccaaaggactcaagtgattctcccacctcggcctcccaaagtgctaggatcacaggtgtgagccaccacagccaacccactcttattttaaagcagtaaaaagttagcatctgctggattgcaaaaacagtccccccaagtactatcagtgtttaatcatactcttattaagatggaaatgatcagaataaactgaataagaaaaaaaaaatgaaggctgatttattcttttacaaaaaataaaaaaaagcaaagtcatagcacataaaacataaatgccattataagatgagccagaaatactctttacaagataacaaaataaacatgtcctaatccatgcagatgaaataatccttacccatggaagtaatactcccatagttctccttcctgtcatccctataaagggacttctgggactggtccaaatgcccccattcctccaggatgaaggatacagccacatcagccacctcttcaattttcaccaacttctgaaacaggagatctccactaaattctcattccctatgtccaaatttggagtgaggggaagaactgggctcattaagaaaagaaacagggggaggaactgtgcctcaaagaggatggggaaggactaggcagaaaggaaaaaggccaaaggaatgaaggtaccaacccaagatgggcctagtcactggctaaagaaacagaactcttggtgaaggttcaggatgggtcctctctgagggcaaaggggcaccagctcacctgggacccagttgagagaagtgaagctgtcagctcctggctgtccttcaggggaagggaaggaacttggagaacaggaagggctaagggaggagaaaaagaggtttaagtgagaacatctttgcccggttctcattgccatcatgttcctcttatgctcaggaatccataatggcccctactgcgccgaggccaaattcttctgcctggctgtcaagaccctctaatttctggatcctctcacactctgttttattcctcctttaccctagacttcctactttggtcaggctaatccctgcttgcctttccgctataaaggatgcattctgtgaccaggcacagtggctcacgcctgtaataccagcactttgggaggtcaaggggggcagatcacttgaggccaggattcaaggccatcctggccaacaaggcaaaatcccatctctactaaaaatacaaaaatcagccagatgtggtgatgcacgcctgtaatcctggctgcttgagaggataaggcatgataatcgcttgaacctaggatgcagaagttgcaatgagccaagattgcaccactgcactccagcctgggcaacagagtcagccactgtctcagaaaaaaaaaaaaaaaaaaaatactgggcgtggtggctcacgcctgtaatcctagtactttgggaggccgaggcaggaggatcacaaggtcagcagttcgagaccagcccggcctgtatggtgaaaccccacctctactaaaaatacaaaaattagccgggtgtggtggcaggtgcctgtagtcccagctactcaagaggctgaggcaggagaattgcttgaacctgggaggtggaggttacagtgagccaagatcgtgccactgcactccagcctgggtgacagagcaagactccgtctcaaaaaaaaaaaaaaggtgggggccaggtacggtggctcacgcctgtaatcctagcactttgggaggccgaggcaggcagatcacaaggtcaggagttagagaccagcctggccaatatggtgaaacctcatctctactaaaaatgcaaaaattagctgggcatggtggcgggcgcctgtagtcccagctgctcaggagactgaggcaggagaatcacttgaacccaggaggcggaggttgcaatgagccgagatcacaccactgcactccagcctgggtgacagagcaagactccctctcaaaaaaaaaaaaaaaaaaaaaaaggatgcattctgctttgccaagatcaaattttattatctcaaagaaccaccaaattcccacatcttccatgaaactgaagcattcctaacagtccagggctgctcgagctttaatgtacaaataaatcacctacatcccctaggggatcttggtacttgcagattctgactcaaaaggcctggggtgaggcctgagagtttgcatttctttttcattttttaatttaattaaaaaaaatttttttttttggagacagagtctcgctctgtggcccaggctagagtgcagtggcgcgatctcagctcactgcaacctccgcctcctgggttcaagcaattctcctgcctcagcctcccgagtagctaggattacaggtgtgcaccaccaagctt

SEQ ID NO: 661 - DNA, 172984 bp, Homo sapiens
  misc_feature (1)..(172984): n=a, g, c or t
aagcttgcagaaggtggttggcttttgttctgaatctaacaagacttatcgggaggctcttggtgcctggcactggctgaatgcccaggttgggggaggcagagcagatgaagcatctgcccgcgagggtgggtggagctgcttgtgaaacgtatcatcgtagcccgggagctgggacactgaagcccggagaaggtgctcatggaggatgggaagggcttcccgaggaagtgacatctgtgctcccatctgctgggtgatgaggaatggcctggacgggatgggcatggtgggtggaggcaggcggcctgtgtgcagggaaggaaggggagagttacaggatgagatgagttgagggaagaagcatggttggcaactctaacagcgctgggaggccatcggaggggggtgacgagattgaccctatcctcatgggcatctcagctgggctgagtgtgctggaaccggccattgcatggacacagtcactcctgaggggatgtgatcaacaggcggaattctgtcacttaatgataacaatagtcaccagctaactgaatgcttactgttaggtcaaactatatgaaactgctaatacttatttcttatctacagaaacagctatttcctgtggttcaacctagtattaccaggcactgtgcttagtgacatcatgcatatctatatgatttatgaaataatgtgtccacgcaaatacacatcacatgtaagactgtaactcttacatgtcaccctcacaatgaccccgtgaagcaagctttgttttgtttcgtttgttttcttaataatattttatttttgtagagatggcattttgccatgtgcctgggctggtctcagactcctggcctcaagtgatctcccgcctctgcctcctgaagtgcgggtattacaagcatgagccaccccacctggccgagcaagccttgttgttcccattttacagataaggaaactgaggcttagagaagtaaagtgttagtcgtgtttatattgccagtcagtagttgagtcaggatttgaactgaggtctcgttgacctcaaagcctatgctgaaaaccacactgctggttccagaaaaccctagaggtgaaaggcttcagagaggcagtacagggtagaggttagcactttgcagcccagatggcctgggtttgaatcccagttctgccccttgctagccatgtgaccttggggaggagattaactagcttctttgtgccttagtctacccatcacatataggaatgagcacctcaggttttttgtgaggattgaatgaactgatgtttgtaaaactgcttagaacgatgcctggggctgtgggctttgtataagcgtgagctattattgtcactgtccttgtcattggtggtgctattcctgtggttcaccaggtgagtgggcacccctgtgagggcagcccggctctaacattttgcctcctggaggtatcggttacgtctagatgttctccagcacagccctgccctgggaggatggcaggagggaaccttcatcaactccccgcgtctgttctctaccccagaggttctacgtggcttcctcccggcagctgaagcgcctcgagtcggtcagccgctccccggtctattcccatttcaacgagaccttgctgggggtcagcgtcattcgagccttcgaggagcaggagcgcttcatccaccagagtgacctgaaggtggacgagaaccagaaggcctattaccccagcatcgtggccaacaggtgggcatggtgggcctgcaggagcgggtggaggaggccgccttagcaccttgtctctttgcctcgatcttttcctcgcaccttgagctgggtataaagccaaaccccggccttgcagaaaggatggagaggcttgatgagcgcggaggacagatgaatcattaagagcagacagcggcactgtagacatgcagtgcccgcggcatttaagtgcagggacacagctcttctggagtcagaaagccctgcaagtgcttcccgttaactgtcatcctagtgatgcaagactgccagcgaccgactctgctattgagtatcttcataccgctgttcccgtctgggggtgatcatgcacccctgggtgatgtgtgtcagaagcaatttactaatactaagctaaaccatatgagattgtcatcttgtgggccagatgtcatggctcacgcctgtaatcccagtactttgggaggctgaggcaggaggatccattagattccaggccagcctgggcaacatagcaagacccccatctctcttaaaaaaaaaaaaaaaaaaaaaaagtagcccatcatggtggtgtgtgcctgtagtcctagcttctcgagaggctgaggctggaggatcgtttcagcccaggagttcaaagttgcattgagctatgattacaccactgcactccagcctgggtgacagagtgagaccctgtctctggaaaaacaaaaaaaggagatgggggtgggagattgacatcttgtggatcacagataatagcatcaatccaaaagaggcagaagtttgctaattatttgctgaatttagagaagtgtccctctcacccatttgcatccttatagacttttctgaaaaagtgacagcaccccagaggtgtcccataaccattagcccgtcttacacactctaatcccatagcgtaagtctgggtgggctaaccctgaatgattacagaccttgacttcccttcagaatttttagggagtttgtcacaatctggctgtgtctgtcggagtagtgaggatcagtcacttggttcataagggctgcaatggagaaaagatcaacaccccatcttcctagaatgctttatattttagaacattaaaataatagttctagtgctatatgatatcatacgaagcctagctttaaacaaataagatggccaggcgcggtggctcacatctgtaatcccagcactttgggatgccaaagtgggtggatcacctgaggtcaggagttcaagaccagcctggtcaacatggcaaaatcccatctatattaaaaatacaaaaaaattagccgggcatgatggtgggtgcctgtacttgggaggctgaggcaggagaatcacttgaacccaagaggcagaggttgcagtgagccaagaccgcaccattgcactccagcctgggcaacgagagcgaaactctatctgaagaaataatagaagagaagagaagaataaaataaaaagtaaaataaaatagttctgatggtacatgataccatactaaacctagctttaaacaaataagatgaccaggcacattggttgacacctgtaatctcagcactttgggtggccaaggcaggcgggtcacttgagcccagcagttcgagaccagcctgggcactctagggagaccctgtctctaaaaacaaaacaaaaaaccaaaaatttgccaggtgtggtggcatgggcctgtagtcgcagctactcaggctgaggcaggaggatcactggaacttggaaggttgaggcggcagtgagctgtgatcatgtcatccacactccagcctggatggcagagtaagaccccatctcaaaaaaacaaaatgacagaaaacatgatttctgtttctattttaaagggtaaaatagtatattttaacactttgaaatgaagagtctgggcttgggaacgttacaatgatgtttactcgtactagttacgcactcccctcccagatctgtctcgtaacaagagactgttattttctacttgtttttagccaaaaggccgagaaacgatggttattttaaatccctagtgtctcttacagttgatgtcttcttagtatttaggaatttccaggacatctttttgttgttgttaatgcactgtgtgtgtgtgtgtgtgtgtgtgtgtatgtgtgtgtgtgattataggagtgacccactacgcccggctgtgtgtgtgtgtgtgtgtgtgtgtgtgggtgtgtgtgtatgtgtgtgtgtgtgattataggagtgacccactacgcccggcctatgtgtatgtattttaaaggcttcaatgagaaaaaagttggttcttaaaaaggcaagcttcagattccagggaagattgcctctggagagctctgttttaatccatgggtttgccagattaatgaggatttactggcctcgtgccttcggccctccctaccctgcgcccattgtgcatgttttgaaaaagcagtgccaggaaggactctctctggaattactgcggagttacttgagttagcaaagaatccccttcctcccccaagagctgtaagccaagtctctgtagagctgactccatgcctgtttgtctgcctgtgtgtcttggcgcaggtggctggccgtgcggctggagtgtgtgggcaactgcatcgttctgtttgctgccctgtttgcggtgatctccaggcacagcctcagtgctggcttggtgggcctctcagtgtcttactcattgcaggtaagaggggatgctcttggctggattattaaagtctgttaatgggggagccagttgtccttggctttggattccagctccaacaggaatgggggagaggaacttgagaggtacggagtttgaggagcaggtacagtgccacagtgcctggtgaccaactagagcaggagacggatttgacatgtggccaggattttccccatcagtcacacagattccttagtggcccaagaggatacttccaggtacgaggggaatgcttttaaagctatgaatttccctctaagaactgctttagctgcatctcacaaatgatgatacattgtgttttcatattgtcacctggctaaaaatattttccagtttcttattatgtggcccatgagttattttggaaatgtgtgtgcttaggagatggcaatgtggcaggcctgggtgatggctatacctggggttgctaatttcggtacctttcttacctgaatgtttcataactcataaccttttatttttatttatttattttttttggagacggaatctcactctgtcacccaggctggaatgcagtggtgggatctcggctcactgcaacctctgcctcctgggttcaagtgattcttctgcctcagcctcccaaatagctgggtttacaggtgtgcgtcaccatgcctggctaatttttatatttttagtagtgactgatggggtttcgccacatcggccaggctggtctcaaacccctgacctcaggtgatctgaccgcctcagcctcccataattcatacttgttgaaaataatttgtttcctattatctcagtggaaaaaaaaaaaaaaagaaaaaggaaagtcaagtacgcccgcttactctagaaatgccacgtgactcttccactcacaggtcaccacgtacttgaactggctggttcggatgtcatctgaaatggaaaccaacatcgtggccgtggagaggctcaaggagtattcagagactgagaaggaggtaggcaagggcccctggctggacctcttggtctttggtgtagctttaccccaaggagatctctggaccctatcctgtgcacctctgcctctgagctggatacctcaccaggtagaagtgcatcttaacgcttgtccagtctttttgcagcacttatttagagcccggttttagggtgaaaatagtttaccggctttacccaagatctggggtatccatatacgagactgtgggatgctgtcagggcattcagaaggtattcacattgtgaagaagtttccccctctatttctctttcataacttctgatggtatcacagagaaagtcttagtctggggctagcaggtctttaacaccttagcaattgagatgatctcccttcaacagacagataaacagcagccctcacacttggagtcttcaacaggacggcttctgtctatcagaaataaccttctgttatttgttatgaatttggtttttttgtgtgtgtgatggagtctcactgtcacccaggctggagtgcagtggcacaatctcggctcactgcaacctcctcctcccaggttcaagtaattctcctgcctcagcctcccaaatagttgggattacaggtgcctgtcatcatgcctggctaatttttgtatttttagtagagatgggggtttcactaagttggccagtctggtctcaaactcttgacctcaggtgatccgcctgcctcagcctcccaaagtgctgggattacaggcgtgagccactgcgcctggcctgttatgtatttgtataggggactcctgttacggaaaataatactacttttccttttgtgattgtaataaattttcctcttaagtaagttgagaaattaagtctaagtgacttgattaagcatattaaaacaacaagagaatgagtacatgcatactacacgaatgatgtagctgggaactgaccaaagtttgggaaaccctgcagttattgaaccccagtcccctttttatagatggagaaaaagggaacctggggagggacaacagctgatccaaggtcccacgtggcttggtagaacagctgggactaggacctgtgcctccagtctttgatgttgcgttgcccttaataactgccttcttaggccctgaacagcagcacaagtaggaacagcagtgataatagataatcacaataatgcctggcgacacccccaccctacattaatgataacagggacacacatagtgccttgtagaatgtcaggcccagacttaaacgtttaatatagagtaatgcactcagtctttaccccgctctatgactgatttttgagacacggtctcactcttgcccgggttggagtgtagtgcgatctcattcgctgcctcccaggctcaagtgattctcctacctctgcctcctgagtgtctgggaccacgggcatatgccatcacaccggactgatttttgtatttttagtagagacgggattttgcccagactcatcttgatctcctgagctctagtgatctgcctgccttggcctcccaaagtgctgggattacaagcgggagccaccatgcccagcccagccctataatttagatgctactattacccccattttacaggtgaggaaactgagacaaaaagctgaagttacttgcccaagatcacatggctggtaaatggcagacctaggcgttgagcctgtgcctcctcagagaccctatccagtgccatgggagtcatgctacccggcctcctgaggagagatgccccttgggagtgagaccaaggcctctgtaaggtctgtcctcctgaggaattcacagaggtgacctcggcccactcctttaacattctgactgggtgaaccaggtcccatgtcacgggtgagcattgtaagaatggcgtgagtgcccccgtgaggaaccaagggtgtattacaccggcggcttccaacttgacactgaatttaattcacttacaaggtatttcattaggttttttttttttttttttttttagatggaatttggctttttttttgcccaggctggaatgcagtggcacgatctcagctcactgcaacctccacctcctgggttcaagtgattctcctgcctcagcctcccaattagctgggattacaagtacccaccaccccgcccagctaacttatttcattagtttttataatagcctcattgacatgtgaatttcacatgccatggaattcacccagttaaagcgttcagttagattgaattcagtttttttttgtttgtttgagacttaagtctcgctccagcctggagtgcagtggcatgatctcagctcactgcaacctccttctcctgggttcaagcgattcccagcctcctgagtagctgggattacaggcgatttttgtatttttagtagagaagggatttcaccatgttggcccggctggtctcgaactcctgacctcgtgatccacccgcctcagcctcccaaagtgctgggatcacaggtgtgagccaccacacccggcctgagttcagtttttaaaagcattttacttttgactgacttttatatttttagaaggatcgtgtttgacaaacccaagagaaagtaattgtcctcattagtcctaccactattctgtatttgcatgtatttttatatatagatagaaagttccacatacttctctccattccgctcactgtgttgttatagcatctccccttcaattatgtacataaattataaaatagagatacacttgttgttttaaaaaagaaaaaatcaatacagggctggacacagtggcccacgcctgcaatcccagcactttgagaggccaaggtgggtggatcacttgaagccaggagttcgagaccagcctggccaacggtgaatcccgtctctactaaaaatacaaaaattagttggcatggtggcaggtgcctataattccagctacttgggaggctgaggtgggaggatcgctggaacccgggaggtggaggttgcagtgagctgaagaaacatcactgcactccagcctgggtgacagagtgagactctgtctcgaaaaacaaaaaaacaaagaagtttatggtggagaaagacagtttgttcctgttcgccccgttcctctcctctccagagagaggccccattagcattcgggtgaatttcccccaaaactttcccgtgtggattcccacataccccaacacttttgtttgcttgtttctttttcttttaacgtaagtggaatctacctgttatcctgtgaaaccttttctttaaccatgaggcacctttgcatctgtgtatagtaacagtcactgcctctaagggctgctgtgaggctcagatgagatcatgggtctcaagtgctgagcagagcaacttgccttagttgcattgtaagcgctcaataataacatttattttttggccaggcgcggtggctcacgcctgtaatcccagcactttgggaggccaaggcagatggatcacttgagcccaggagtttgagacgatcctgggcaacatggtgagacatcgtctctacaaaacaaaaaataatactttttgttgttggcggtggtggtggggtttttttttgtttttttttttttgagacagaggagtcttgctgtgtcacccagactggagtgtagtggttttatcttggctcactgcaacctctgcctcccagattctagtgatcgtcgtgtctcaacctcccaagtagctgagattacaggctcccaccatcaggcccagctaatttttgtatttttagtagagccagggtttcaccatgttggtcaggctggtctcaaactcctgacctcaagtgttctgcccacctcggcctccctaagtgctgggattacaggtgtgagccactgcgccggcaacgctgtgattttatagcacgtccacaaaagggctgcatgtcttgcctaaaagttgcccggcgttttcttgttatgtgccgtctgcagtgcccctgagcttggccatgtgctctgcagcctggttcagcacctgtgtgtgccctggacggggaggtgcattccccgaggctaaaaccagtgaacctggcccaggccatatccagctgtgggcctcaggaaatgctgaactgaactacttttcaaaaggagggttgtgtgtccctgggcaagttaccgcccctctctgtgtctcagtctccttgtgtgtaaactggggataatgaaaggaccctcccacatggggttgctgtgaggattggatgagacactgcgatacagatgctgcttttatccttgccttcctgccggggtgggcagccagggtaactcacttttattgtcgtgtctgtccagagaagaccactcatttcattgactccatttataaatatttatttaaatttttttttatcaaaaagtaagttttattggcatctaaaaacaaaattcacccaacactgaaacatacttcaatatttatgttattgttttcttgtttcttttttactcactgcagtgtgaggaacaaatcacatttactttggagaaacagagaccatagtgtagattttacaaaatcactttttaaactctctgtattgcgctcctcaaatacctagagccagtctgtgcataacatggcacactgttgtctaaaccgtaaaattttgcatcagcctaaagatatggataagatatacctccacttgctcttttgaaatacatctattaccttatccagcctaatgatagttacctaaaaaattctttgttccgtaggaagtctctgacaagctgttattcatttccttgacgttaaaagaatctgggggcaacatttatattttatcagaaaaactttttaaaagtttacctatcatgttcatattgagaacaatgtctgtggcgggcatggtggctcacgcctgtaatcccagcactttgggaggtagaggtgggcggatcatgaggtcaggagttagagaccagcctggccaacatggtgaaaccacatctctactaaaaatacaaaaattagctgggtgtggtggcgggtgtctgtaatcccagctactcaggaggctgaggcaggagagtcgcttgaacctgggaggcaggggttgcagtgagctgagatcatgccattgcactccagcctgggcgacagagtgagactccgtctcaaaaaaaaaagaacaatgtctatacaaatcagttgtacaattattttaaaagaatggtgagcatgaacgtcacgttaattctggcagacaaaaatgaacaactatggtccattgagccattatctgttacacagagatgacagctttacagaaggtatctctgacctactgagggatgatcatgtcctctcagtttctgtgccttctaccactagttcactttctatatcagcagctgtgtcactcttcttgtttatgttcataaatgtgtgttgaacacctactatgtgctctgagccctgggatacagcagtgaacaattagagcctgtcctcattgagtggatggtgcagtgggtgtgggagacagaatacactcaagcatgcgagccccaagagggctggggacaggcagtgccctgaaggagaaggcagtgcgggaggggacagagggacacagggctgagagggtgctctgtatcgaccagagatccacaggatgcaagggggtcatttggggaataacattccaggaagggcaaccccccagtgctgaggcctgggaggccaccttgggcagcagagtgagtgagaggggaggtcaggggagtcacagctttaccagatggactggaaattccttactctctcccttcactgcgatcgaaggcgccctggcaaatccaggagacagctccgcccagcagctggccccaggtgggccgagtggaattccggaactactgcctgcgctaccgagaggacctggacttcgttctcaggcacatcaatgtcacgatcaatgggggagaaaaggtgggtacacatcgccccattccctcacccattcccagtcgggcacagggtgccatcgggcaggtgaacctagctgcagcgtctccccagtcactcacggctccacacctttgcttgaatggctttttggggggctgggagtggactgtggcagtaaaagctgttcagagcgcatacaacttgcagaagtgaaggcttttaggtgaactgacagcctgaagaccaaatgagccccacagatttgttttggaagattttttgttgttgttgttgagagagggtcttgctctgttacccaggctagagtgcagtggtgtgatctcagcccactgcagcggcagcctcccaagtggggggactacacatggttgggagtgcaggtgtgtgccactgcacctggccattttttgtattttttgtagagatgggggtcctactatgttgtccaggctgatctggaactcttgagctcaaccggtctgcccgcctcagcttcccaaagtgctgggattacaggaatcagccaccattcctggcccctggaagaagttctttttttgttttttggttggttgttttttttttttttttttttttttttttgagatggagtcttactctgttgccaaggccagagtgcaggggcccgatctcagctcactgcaacttctgcctcctgggttcaagtgattctcctgccttagcctcccgagtagctgggactacaggcatgcgccaccatgcctagctaatttttgtgttattagtagagatggggttttgccatgttggccagggtggtcttgaactcctgacctcaactgatccacccgcctcagcctccccaagtgctgggattacaggtgtgagccactgcacctggcctggaagaaatttgaataagttgcaaatactgaaaaatctggaagacttaatataaaaatttattttctgctttttttggaagatcagaacatctggcaacatcaggtcaatcctcccccgcctggctctttctagtcaacctgtgagcctcctggttcaccccagtccctccctgtcccattcattgcctagttggcccctccaaaacattagaatttgtgatctctagaataaggtgtcaccatcccttctagggggatggctcaagggaagtgagaaattgtcagaattttggaaccttctcttggttccgagctgttcttggaagaggttccttgacctgagtgatacccttagactttcctctggaattggtctgacagtcttcctggccatttgctgggggacaaggctgctttcacctctgaacatatggacttattgaactgttcctacgtacctcccacaaagctcagaacattctgttcccagcagataatttctctctgagttacagagaagagcagagtgggtgatgttcttgctgtctttttttgtttttgtttttgtttttgtttttgtttttgttttgttttgttttgttttgagacagcctctcactctgtcacccaggctggagtccagtggtgctatttcggctcactgcaacctccgtcccctgggttcaagtgattctcctgcctccgtctcccgagtatctgggactacaggtgcatgccaccacgcccagctaatttttgtagttttagtagagatggggttttaccatgttggccaggctggtctcgaactcctgaccttctctgatccaccttcctcggcctcccaaagtgctggaactacaggcatgagccaccgtgccccagcccttgttgagtctttatggcttatctcacgtcatgagaatttttgcacgcatgctgctctgtgacacccctgtaggagggaagaaggagcccacttctcaagagccaggcaggaaggggagaactggaggtcaggaacatcatcctttggccattagctagagaacctagttccttcaagagaggatgcatggagaccaggtcatagcaaagggccggaagatctgcctgaatctttcagatatttcaacaactcatgatgggaaactcaccatcaaaggtgtgaaaaacagtggggaaatgaggaaatgcctgattattacttaatagtttcttgagtctaaacaaatagggctttgttggaaattccttctgcctcttctgtatctcttttgaggtctctagtaacttataaaaagccgagtcattccttttgggagcctggcaaagggaagagagtccttcttgaccttcggccgaaacacccttaaaggagtgtctctgggcagcgcgcaagggagagggctgtcgagttgggttgaccagatgactgatgcctgaggtggggccgagatgagggcactttggggcagggacaagtccggatgccagcattcccaccacacctgggcccttctgtcctgcaggtcggcatcgtggggcggacgggagctgggaagtcgtccctgaccctgggcttatttcggatcaacgagtctgccgaaggagagatcatcatcgatggcatcaacatcgccaagatcggcctgcacgacctccgcttcaagatcaccatcatcccccaggtggggtctgggtgtggcccagggggtgagccagagctggcaagccctatgattgcactgacagtggtgtatgtatatttttggggcaaacatacatttggccctacttcatcgttctttttttttttttttttttttttcctgaaacagggtctcgctctgttgcccagagtggagtgcgctggcgcaatctcagctcactgcaacctccgtctcccaggctcaagcgattctcccaccccagcctcctgagtagctgggactacaggcacatgccaccacacccagctaaatttgttttgtacttttttgtggagatggggttccactgtgttgcccaggctgcccttgaactcctgggctcaagcaatccacccaccttggcctccaaaagtgctgggattacaggcatgaggcaccgtggctggccttcattgtttttattgaagttaggctgtgctgctgcttccctgaatttcctcttagtatatgattaacaacgtgggaattaactgactatcagtcccgacttcctgtccccgggaggggtagtttcagagcatctagaaaaatccaaaaagacaccgtcttctctctctgctgccagagtcagactgagcatctctaacccttccaagagctagacaagaaataagactttttaattttcgattcacggggtgcacctgcaggcttgttacgtgggtatattgtgtgatgctgatgcttcggcttctatggatctcatcacccaactattgaacagagtacccgagagagagtagtttctcaaccattaccctcctccatctgtccccacttatggaggctccagtgtttatcatttccatctttacaaccatgagtacgcagagtttagctccctcttacaagtgagaacacacagtatttggtgagaaataaggattttctttttctttctcttttcttttttttctttttttaactgagacggagtctcactctgtcacccagtgcagtggcacgatctcagcttactgcaacctgcacctcctgggttcaagcgattcttctgcctcagcttcccaagtagctgggattataggcacgcaccaccatgcgtggctagtttttgtatttttagtagaaacggggtttcaccatgttacccaggctggtctcaaactcctgacctcgagtgatctgcctgcctcggcctcccatagtgctgggattacaggggtgagccaacatgcttggctgaaataaggattttctagaccaatccccgcaggtggattccttaatatgttgccttttagtgtaatcttccctaaagtgtcttagaagattctcttctgtggttggatgacgggagaatccacgggactttactgttaggaatcacctgtgctgcgtctcatttctggaggttctcaacccacttgcatattgaaggctccaggaagttgtatggaaaggaaatctgttgtattctgccaaactcagactttccagactttttttttttttccattattaaggcaattttttttttggagatagagtcttgctctggagtgcagtggcacaatcttggctcactgcaacttccgtctcccgggttcaagtgattctcctgcctcagtctcctgagtagctgggactacaggtatgcaccaccatgcccagctaatttttgtatttttactagagacagggtgttgccatgttggccaggctggtctcgaactcctgaccttaagtgatccactcgcctcggcctgccaaagtgctgggattacaggcgtgaaccaccgtacctggcctttttctccattattaacatctccagaaatagtgattccaaggagctctgataccccaccttcaacagtcctggccagaagtccttaggtcgcctccatccatgtcagcatgacacaggtgtcacatgccgtccactctcttctctctgaacaggaccctgttttgttttcgggttccctccgaatgaacctggacccattcagccagtactcggatgaagaagtctggacgtccctggagctggcccacctgaaggacttcgtgtcagcccttcctgacaagctagaccatgaatgtgcagaaggcggggagaacctcaggtaggcgggggtgaacaaggagacaccgggtaaggtgtcctaggcgccatctcggtaggggtgtttgaagattctgtccagatctgtgtcacctggatttgagtcccagatgaccatttgtcccttcacctcttggagcctcagtttctgtatctgtaaaacgggtctcaatccaggctctttgtaccatgaggtagaataaccaggatgaccagtacatttccttttatacacaccagctccattcagttgatagtggctgtcagttgttaagctatggaaagtcttctgtaccagttggtcactagcactgctctgagcccccaggtccccatgcactaccccagctgtcttggtctctaccaggatcctggagctctgtccatgacccagcaactaaagcattaatgcctggcacaccagcggaacctctggggtcctgctttggtggtgtttgttagtgcctggttctggttctgttatccgtctccatgacaaccaaccataaagcctcaggcatgttcaaccataaagcaacgatcattgctgccatacgagggcagtcagccaggtggctctgctgatctcggctgggctcacatgcatgtctgggagtcagctggctgttggctgatctcggggtcagctggcttttggcctcaggtggggcaagaagggtatgttccgtgcatccctcattctccagcagaccagcttgggcatgttgtcatggcgatggcaggggcacaagagcgtgcaagcccctattgcatctaacagtattcttttggctgtccttacttttgctggtgtcccattggccaaagcaaggaacatgtctgattccagagccacctctcatggccccacagttggataagggatgcatgggtatgaggcctttttttttttttttttttttttttttgagacggagggtctcactctatcacccaggctggagtgcagtggcgcaatctcatctgcaacctccgcccccaggctcaagcaattgttctgcctctgcctcctaagtagctgggatgacaggtgcctgtcaccatgcccagttaaattttgcatttttagtagagatggggtatcaccacattgtccaggctagtctcaaactcctggcctcaagcgatccacccgccttagcctcacaaggtgctgggatactaggtgtgagccactgtgcccggctcttattttttttttattttattttttttaagagacagtgtctcactctgttgcctaggctggagtacagtggattgatctcggactcttaactcctggactcaagcaatcctgcctcagcctcccagtaactgggactacaagagcatgccaccacacccagctaatttgtttatttttgtttttggagagatgggggtcttgcttttttgcccaggctggtctcaaattcctggcttcaagctatcctcccacctcagcctcccaaagtgctcagattgtaggtgtgagctgctgttttgagaatgattctgaacctgcatcttgctgaataggagatgtgctctgattgattagtgatgtctgctgcagacacagatgttgggagtggacatgctttcctggtcaagcaacatagagtgtctcctttcgcttctcccagcctgggcctaggttcagggtcaggggtggtttgacccaacactatctcctggtttttttcttccggtcaagtgtcgggcagcgccagcttgtgtgcctagcccgggccctgctgaggaagacgaagatccttgtgttggatgaggccacggcagccgtggacctggaaacggacgacctcatccagtccaccatccggacacagttcgaggactgcaccgtcctcaccatcgcccaccggctcaacaccatcatggactacacaaggtgatgccactggcacagtggcctctaggctttgggagtttgccttactcactggctcactcattaattcattaattcattcaacactgtccttatccctagtgacagccccagtgggtggatcctctcttcatcctggatggtaccagctatttctttttttttttttttttttgagacagagtctcgcttcatctctggagtgcagtggtgtgatctcggctcactgcaacctctgcctctggggttcaagcatttctcctgcctcagactcccgaatagctggaactacaggaatgtgccaccacgcccatctaacttttatatttttagtagtgacagggttttgccatgttggccaggctggtctcgaactcctgacctcaggcgatctgcccgcctccgcctcccaaattgctgggattacaggcatgaaccgctgtgcccagtggtaccaggtatttctaatatcatctagtcattcattcacgtcagcgcacctgcggtgttcccagacactggggactctgtaggctgctgtcagacaaagtccctgcctccaggaccaagtagcttattagatggaggagacaaaaaatatacagagcaataaaccaacaggattccagagggcagcaggtgctgggaaggacgcttgccaaggagacgggatagcgagtgctgggcagggccactgtttccattgaacactgcaggcccagtgcgtggggcccacaaaaaggttttattttttttaaaaaatcagaagcaggccaggtgcggtggctcacggctgtaatcccagcactttgggaggccgaggcaggcagatcacctgaggtcgatagtttgagaccagcttggccaacacggtgagaccctgtcaccattaaaaatacaaaaagtagccaagtgtggtggtgcgtgcccataatcccaggtacttgggaggctgaggaaggagaattgcttgaacctgggaggtggaggttgcagtgagctgagattgtgccactgcagtccagcctgggcaacagagtgagactccatctcaaaaaaaaaaaaaaaaaaaaaaaaaaaagaatataatccaacctggattttatttatactaacacagtcataaaatagaatttctagcattttgtgtggagaaagccacctccgtaggcatcagtgccggggaccacaaaagtcagaatgctgccatagtgccagggtcctggggggttttgagttttgtgtgggtcatctctgaagaggtgacattttagctgagacctgaacaatgaaaaggagtcagccttgagaagatctgggacagcgatctgcaaccttgttcttaagggccggggtagtttcagctttgtgggccacatggcctctcagccacttgactccagtgttgccgtgtgaaagcagtcatagatagtgcacgaatgaatgagcatggctatgttccaataaaactttattcataaaaacaggcaaggggtcagatttggcctgcaggccacagtttgccaaccttggatctaaaggaagaacattctaggcagccggtacagccgaatgtaaaaatgaatgcgcttaatgaatttgaaggctagcatgaggaggccatgtacctagaggttggaattgagtggacaggggcaggagattaggccagaaaggtaggcaggggctggatcttagagcaccatgtaaccacggtgagaagcttggaacttactctaagagccctataaagccattggaaggttttaagcagggaagtgacatgagtttctattttattttatatatttttgagacagggtctcaccctgtcgcccaggctggagtgcagtggtgggatcacagctcactgcggcctcaagtgatcctcctgcctcagccttccaaagtgctgggattataggcgtgagtctctgcacccagctgacatgatgtttctagttcactgagtaccacctactaagtggcagatgctgagttggtgcttttgaaatataggacatagaaatgaggacagaagtgggcagtgtcaaatcttacaggacctaaaatattaggggtcagccaactatggcccacaggccacagatctggccccctgcgtgtttttatgaataaagttttattggcacgcagccacatctgttcattttcctgttgtctctggcagctttcacactataaatacagcagagatgcgtagttgtaacagaaagcatatggcctgcagagcctcaagtatttactatctggcctttttcagaaaaatgttgccaatcgttattgtagactgtggtaagatctttttattttactctgaatgtaatggaacagtgaatgtgaacagtcaacactgttaataccattcacaccatgattgatgtggggtagatattaaggagctggcctcatgggaatctgacattgactagaaatagggattgagggtgagcaaccagctggaaggtactgcaccagtcctagcaaaaagtgttaggggcctgacccgaagcagtgacttgcccaggtcagttgtcccaggggcacgaggtgctcacccctccccttcccctcatgtctgtatcccctctccctcagggtgatcgtcttggacaaaggagaaatccaggagtacggcgccccatcggacctcctgcagcagagaggtcttttctacagcatggccaaagacgccggcttggtgtgagccccagagctggcatatctggtcagaactgcagggcctatatgccagcgcccagggaggagtcagtacccctggtaaaccaagcctcccacactgaaaccaaaacataaaaaccaaacccagacaaccaaaacatattcaaagcagcagccaccgccatccggtcccctgcctggaactggctgtgaagacccaggagagacagagatgcgaaccacccaaaacacgcacaccctgcccctggtgccctgagacagacacacagcctcacgcccccaggaatgcaagtggtttcctggtgcttcccacggaggagttttggcagccagacttctggaggaattggttgtatagaagatcctagtgaccaaattcagcctactgcctcggatctctccagccgaagtctgtggactgcaagtctttgagatgcttctggctcccatcacctctaacatccttgtctgggtctaccaggaacgcttcatttccttggggctgcagttttgtggttgaggggcctggagaaaatcattttctccccttggcagtgtcccagggccctggatggtcctcttaccaacatctggtcttccaggcactcaaaagctgggaaccagcatctcagcgccagctctaccagttctcgttttgggccagaggcagcctctgcactcccacgcctgtcctcctggaagggacctggttggactaacggctaacctggacctggaactgtagggccaggggattgtctcagggccgacgttccacctggggcttccctccccacccaccccgactccaggctttcccttttttcttttgttcaacattgtaagaacaatcaatgctgttattactgatcccaccatgattgatgtggggtaaatattaaggagatggcctcatgggaatttgaccttgactagaaatagagactgagagtgagcaaccagctggaaggtactatgccagtcctagcagaaaaatgtgttaggggcctggcccaaagcagtgttggttgcttacagtgttgattgattttgttcttttttcttaccacctcttttctttccctctcatggtacctgctcatggttatgaagctttcaaagtaaagaacacgaaatacctcccaagtattaccagtgggtaccaaaaaaatgtccccttgagtcttttccttgtttttagatgttaattctctcccttggcatccggttagccccccagggggggcagcattgtggagaacttgatatttagttactgatgctcttccaggacacgaaaagaacccatctttgaatatcaatgatttttttttttttaagtactgttccggggagaaaaacagtctcaaaacttgaacttcttgggaagagaagtgttgggctgagaagtaacattcccaggaaatagtgagaagctcgccctgtgtttgaaaccgtgttggtctctgtgttcctggaagaaaacagggaagcagcatcttttaaagcctgttctttaaggtgtctcgttagagcccaaagtggaatccggaaggcagccagagctgaggctgccccaagactcagacttgctaagaattacgccgccgacttcaaacccagagagcatctttcttttaggcgaaaacgcatatatttattttttgtaagttataccattctttcacattagataaactaagttttgggggatccttttgtaatgacttacactggaaatgcgaacatttgcagtaaaaaaatatatatatatctatatattttatttctttctaaagaatggttccctttcctttggggcctcggcgagggttccagccatgtcctctgcagggtcaggatgtggcatcttcctgtttctgttctttccttttgacaacaagtcgcctctagtgggagctgttgccagaaagggcaagttgtagagatcactagtcagatggggtttagtgggaaggcgggacagccgcaaggtggacggagcccaggttttggggttggacagaccctggcttgagtcctgctcttgtcatttgctgttcttgtgaccctggggaagtcactcagcctctgtgcctcacttgctttgtctgtaaaatgaggctgatcgtacttaccctgtgagcagtgatgtgtgcggtactcgtagcctcggtcaggttctaagacacaggcgaggcagaaatcacatgtggccagaacgatccttgaaaatcctgccctcgccctgccctttttttttttttttttttttttttttttttttgctagaggcacggtctcactctgttgcccaggctggtgtgcagtggcacgatcatagctcactgcagcctcaaactcctgggcttacgcaatcttcctgcctcagcctcctgggtagctgggactacaggcatgtgcccagctaatttttaaaaatttttatagagtcagggtcttgctatgttacccaggttgttcttaaactcctgggctctggggatcctcctgcctgagcctcccaaagtgctggggttcaggcacctggcctgaaaatccctttatgttagtccagagaggcgaggctgcgctgcagtaacaaattcgccgtaaaatcttcggaaatgatcacaaggctttatttcttgctcacgcagttcttggtgagggtcagctgcctctccagggtaggtgacttccctgtgacaagtgatccaggctgtcctggttttgtgacatggcctcccaagggttggcctccaggtccccacagtgggagaagggagagtggacgactctcacccactcttctgtgtctgaaaccggaactgacgcagttaatcccactcacagcccattggccaaaatgagtcacatggccccaacccaaccactgcgggagctgggaaatggagcggtgcctgtggaagagaaggatttctccctttcctaactgatgtggttctggagttttggatagcggagtagtcagactagtgtgttcggtttctaacttcgaactgggtgagtctgggcagtaaggaatgtctgtatttggggagcacaccatttctgccacacctaaaaccatgcaccaagtacatgtgcagatagaacgttctagcactgccattgttccctcaagctttcctgtcccctgattgaaattgttggcttgcactagggactgtggtgtacaaaggtgctcagggaagagccggcgaggtggtgaccattagaatgagtagtagtgtctgggtgcagtgactcatgccccattgaaactgttggcttgcattagggactgcagagtgtgaaggtgcctagtgaaaagccagtaaggtcataaccattagaataggtagtatcagccagccgggcatggtggctcatgcctgaatgatgtcattggcttgcattaggaaccacagagtatgaaggtgcccagtgaaaaactggtgacgttgtgactattagaattagcagtattggctagacgaggtggctcatgcctgtaatcccagcactttgagaggctgagacaggaggactgcttgagctgaagagttcaaaaccagcctaggcaacatagtggaactctttctatataaaaactttttttttgttaaattagaagtagttgaggctgggtgcagtggctgacgcctgtaatcccaggactttgggaggctgaggcgggtggattgcctgaggtcaggagttcaagaccagcctgatcaacatggtgaaaccccgtctctactaaaaacacaaaaattagttgggcatggtggcacatgcctgtagtcccagctactggggaggctgacaagagaattgcttgaatgtgggagataaaggttgcagtgggctgaaatcaagtcattgcactccagcctgggcaacagagcaagccgagactccatttcaaaagagtagtagttggatctaccagcgggaatcttaatagggatgtgagatgtgtttagatctcaaagcctgaccctgagtcttaaaatcccaggtcagatcctaagcagtcccagagagctccacctggtgtgcatctgtgccagtgtcttggggtggggcagctgcatgctcaggtggaatccggggctgagttcaagtttaatccactttatgaagaggaggcagagtgaggcataactcctcatccaggggagtggaagtactgtggaaggaagctctgttttgtacctactacgtgctggccctggcctcactgtgcagaactctccacattggaaaggatccccccagaccagagaggcgtaaggagggggctggtgctttccagtgttgaactgttcatctgtcctcacacccaccatcgggtcctacagcaaatttgtttgattttctgcaaaacacccagaatctatccactccccgtcctcccattgccaccacgctggtcccagccaccccactttctccctgcatccctacaacagctgccacagtggtctcgaggcttttgcccccagccccccacacacacatcagtgtcctcaacctggtggctgtagtgaccttatgaaaacacgcactggccgggcacggtggctcacgcctgtcatcccagcactttgggaggccgaggcaggcagatcacctgaggtcaggagttcgagaccagcctggccaacatggtgaaatcctgtctctactaaaaatacaaaaattagccaggtgtggtggcgagtgcctgtaattccagctacttgggagactgaggcataagaattgcttgaactgggaggtggaggttgcagtgagccaagatcacgccactgcacttcagcctgggtgacagagtgagtgactgatggtgaggacacgggctctgaagccacactgcttgggcagagatgccactcattctgtttgttttctcatctgtcaaaagggcctgatggtagtaccttcctcatcaaaacgttccagtaaggggcccagtgaggtggcttcctcctctggtccactgaatgcgtgcgtggcgggcatttaaagcagtgtcaggtatacgtagttacgtgtttgcagtggcgaggtggactgttgagttttaaagagtctactgggcgcaggcactgaccagagaggaagtctgcagccttgatggatgaaattcgtgttccacccaccagccagaccctactggcagcagcccatggcgggggtattaatggcctgggcatcccctctggcgcgtctccagactgccgtggtgtgggcccaacagcagtctcgttagcaggctggcaggtgccggttcccacgtgctggccgcctgtggcccaccctctgctccctggcacacagcctaggaaagagagtctggtggccctgggtcatccccagctgagtttgccaaatgcccacatggcagcccctgcctagggtcactctgcaaggcaggtggctcagctccagccagagaagacaggctgcatctgccgcccttcctttctctaaaggacaaatgtgccctgtgcaatgactttggtattacacccagaaacagatccccactctgtccttactgactgggtcaacttggcaagtcatgtcaaccccttgagcctcagtttcctcacctgtgaaatggagctaggaataggtagttgtgggtccacagctttgcaggcatgactaggggcaggtcaagaatgcggacttcctgccccactttgaaggtggtagaagctgcagttagaagtttactccaggccaaaaggggcatcacaaaacctgtgaggatgggccatcagaaagtcccatgacctgatgggcggagcaggccctgtgtccttaagaaaaggtggagttcttgccctgccacccctgacaccagcaaagccactgctcaagtatctgtggatgatggatggcagcggggcaggttagaccggggattctcaaccaagtgggtctttttgttttgtgttttttcagacagtcttgctctgtcacccagcctggagtgcagtggtgtgatcttggctcactgcaaccttctctgcctgggttcaggcgattctcctgcctcagccttcagagtagctgggattataggcacctgctaccacacccggctaatttttgtatgtctggtagagccaggggttcaccttgttgtccaggctggtctcgaactcctgacctcaagtgattcacctgcctccgcctcccaaagcactgggattacaggcatgagccactgcacccggcccaactaggtggctttgaccccctgggggattaatggcagtgtcacaagtctggtggcggtagaaggaggatgttattggcatctagtgaagaagaggccaggggcgctgctgaacgtcctacgatgtgcaggacatgtccccacagcacagaactatctggccccacgtgtcaataaggttcagaaagcctgggggattgccttctgtgcttccacgaacacatatccatgtattatgtcattcttgcggcaatgccacgaggtcagtgagactccctgactagcatacataatgttaggatctagggagttgtctaatgtctcacgctgcccttcccagcgatctatgtgtggccttaggcttggctactttagacttagtccctcttttccggtgcctgcagctggtttggtgagtccagtattaatatactgaccgctgtcagaaagaggagtgaggaggctgggcatgatggttcacgcctgtaatcccagcacttttggaggccgaggtgggcagatcacctgaggtcaggagttcaagaccaacctggccaacatggtgaaaccccgtctctagtaaaaatacaaaaataattagccaggtgtggtggtgggtgcctataatcccagctacccggcaggctgtagcaggagaatcgcttgaacctgggaggcagaggttgcagtgagccgagatcttgccactgcactttagcctaggtgacagagtaagactctgtctcaaaaaacaaaaaaagaaatgtgtgaggaatgcaacaagctgtgcattgaccacccttggttacagcaagttctccacgctcagccgggtccagcctttggctgtcagcagcatctggagcggaactgtgaacagaaacactccaggtgttccgacgggtgctggggcgcccccagggagctggaatttggtttttagcaaccacatataggaaatgaacccgccagccacagtatctcacgcctgtaatcccagcactttgggaagctaaggccagcggatcacctgaggtcaggagtttgagaccagcctggccaacatggtgaaaccccgtctctactaaaaatacaaaaatcagctgggcgtggtggtgggcgcctgtaatcccagctgctccagaggctgaggtgggagaatcgcttgagcccgggaggtggaggttgcagtgagtcaagattgcacccctgcactccggcttgggtgacagagtgagactttgtctcggacaaaaaaaaaaaaaaaaaaaaaagaaccaagtcctcgggcaaattctcccattgagggctgtgaagtcttggctcctctgttgtttgttttggaaaccaaacttgcatatttgactttctcatgcgtggagaggacccatgcttggcatgggggggcacctggtttttgtgtccttggagctcatctctggtgggggaggaggagcagcaggagatgcgagggctgtagttctcagtcctggccgcacattggaatcctatgggggagctttaaaattatacaccaaactcggccaggtgcggtagctcacgcctgttatcccaacactttgggaggccgaggagggtggatcacatgaggccaggagttcaagaccagcctggccaatatgctgaaacctcgtatctaataaaaattacacaagttagccaggcatggtggcgcacgcctgtaatctcagctgcacgggaggctgaggcaggagaattgcttgaacccaggatgtggaggttgcagtgagctgagattgagccactgcacttcagcctgagcaacagagtgagactctgtctcaaaaaaaaaaaaaaaaaaaaatacacacacacacacacacacacacacacacacaactggagaacagagcatggtcactgggggcaggagcgagagtgatgggtgtggtcggaaaatggtggtggctattccgtatcctcaccctggtgtggattcatgagcctacatgtgtgataaaactgcatgggacaaaataaacacacacacacacaggagtacaggtaaaacgggaaatcgagcaagattgttgtgtcaatgtcaacaccctggctgtgatgctttatcctagagttttgcaagatgttaccattgggtgaaatggggtaccaagtacacgaatctctctatattattgtttctttaactgcatgtgagtctgggattatcccaaaataaaagtgttaatttgtaaaaagtacacacagcatggcagttcccagcctcagagattctgatttaagggtctagccgggagcctgggcatgtgcttgaggcccccaggtgagtccagagtacagcggggctgagagtcgctgttgacattggctgcagggtggacagggcgagatgggccctgcccgggcagacctgtgtattgctaggtccttccggctctgatgctctgtgataattggccactttctctgccattttcctcccagagagcaaacacaggtctagactcaatatcgtgtggagctatcgatgaccacgggtcacttccatctccagcactgcaggctgtgcgggctggtccaactggggtacggttgagggtcctggctcagaccaggcctgactcctgggccagtctgtaaaacaggcccttctgggccagcagctgggccgggctgccgctctctgccacctgccccttgtccatgaccagaaccctgtgggggagagggagacagagaggctctctggacaccagcccaggctctcggcagctgtgagagcccagtgtgtctgcgctgaggttttctccatagaagtcctgctttccatgcggctccctggccctcacagctgggttggaagcgtgtgctgggcgcatgtccttgggcagctttcccacttggcatgtgttcccgggcattcctcccgctctggccccattcaggacccctccagctctaacccgaagcccagtggcccaggactgcctccgcctccttcccccaccactgcagggctgctgtgaggtcaggccggggcgggagccttaccgggcacagtccatcacggagcgcaggcggtgggcaatgagcagcacagtgcactgtgcaaaccagctcccgagcatggcctgcatctgcagctccgtgccagggtccacggcagcagtagcctcgtccaggatgaggatctgggtcttccggagaagggcacgtgccagacacaggagctgtttctggcccacgctgggaacgattgggacaattagctgggacgtgcgtttgtcggcacatggtgatgtgtgggtgtgcccagaaacaggtccctgaagcagtgcaggagtgaggtgcctgtgttcaggcatccccacacatggggtctggggtctgtggtctgcagaactgataggaagcctgttcctgccatctttgagcaggctgactgtaggcaggtcattcaaaccctttgtgcctcagtttccccacctgtgaaatggctattttcttttttctgtttatggctctttttttcttcttcgtttttctttttttttttgagacggagtcttgctctgccacccaggctggcgtgcaatggcacaatctcagctcgctgcaacttctgcctcccggttcaagcagttttcctgcctcagcctcccaagtagctggaattacagtcatgcgccaccatgcctggcttttgtatttttaaagtagagatggggtttcaccatgttggtccgacttgtttgaaactctcaggtgatccacctacctcagcctcccaaagtgctgggattacaggcgtgagccactgcgccccggtagttctatttctagtttgttttttgagaaatcatcatactattttccatagtgactgtactaatttatatttcccccaacagcgaaagcacagctttcacttcagtcatgccgttgcaaacaaacctacaatgactcactgctgcttcaagaatcaaatctacagtcttcctaagacattcaaggctggtgtcacgtgggccttaaatacagatgtgtacaacacctgggtgggattccaggcgtgatccaccgtgcctggcctgtttatggctatgtccagttctatttctagtttccaccttgtgccaaacacattctaagtgcttgtatatattcactcaatcctcataatgtccaccaaggtagatattattgttctcttcttttgagagaagaggacacagatacagagaagctcagtggcttgaccaaggtctcaaggctagtggtgggtccataatttgaacccaagtcctctgaccccagagtctgtgctcctaatggatccgtcctcgctgaatcgtgacgacatggcacataaaagtgtgtgggtggcggggcacggcggctcacacctgtaatcccagcactttgggaggctgaggtgggcggatcacgagatcaggagatcgagaccatcctggctaacacggtgaaaccctgtatgtactaaaaatacaaaaaattagccgggcgtggtggcgggcgcttgtagtcccaggtactcaggaggctgaggcagaagaatggtgtgaacccgggaggcagagcttgcaagtgagccaagatcgcgccactgcactccagcctgggcgacagagcaagactctgtctcaaaaaaaaaaaaaaaaaaaaaaaaaagtgtgtaggcttgtcacagaataagcccttggcatggagtagcacccttcgtggagggtggaggagttgagattccaggttgtgagcccagtgagcccctgacccaggtgggaactgacccctggggccccagcatggctgtcttgcacagtaagcccttccatgaaacagcatccttttacatgatcagaacctactatggtcatgcaggcgttagagtgcctgggtcttgtcccaacctcactacttttaagctgtgtgacgtcaggcaagccccaggcctccaattccaactctgtgaaatgatgttatcaggagtgtgactcaggactaaaatgagtatttactctttgctctatgcctgccactgtttcaacaactttgtgcatataattcaatccttgcaaggtaggtaggtgctattattcccaccttacagatgaggaaactgaggcacacaagataagttgcctaagatcctacagctagtaagtggcagggcggggcgggggtgggggtgtggggtggggggcctggatttgagcccaggcagtctgtcacctgtgtatactcttacccaccaagcaacgctgcctctctagtgctggaaattattgcctaccacaagcccttcggacaccctcagggtcagaggggtttataaatccagaacaccttaggtttttttttgttttttttgagacggagtcttactctgtcacccaggctggagtgcagtggcacaatcttggctcactgaaacctctgcctcccgggttcaagcgattctcctgtctcagtgtcttagcctcccacgtaactgggattacaggcgcctgccgccacacccagctaatttttgtatttttagtagagacggggcttcaccatattggtcaggctggtcttgaactcctgacctcaggtgatccacccgcctcggcctcccatagtgctaggattacaggcatgagccaccgcgcccagccactttggtttttctaaaggcatatacctatacacctatgttcatagtggcattattcaaaacggccaagaggtggaaacagcctgggtatctactggcagataaacggataagcaaaatgtggtctatccatgtagtggaaaattattcggccttaaaaaggtagagaatctgacacatgctacgatgtggatgacccttgaagacatcatgctgtgtgaaataagccagtcacaaaaggacagatcctatgattctgcgtctatgcagtgtctagagtagtcacactcagagagacaggagaatgctggtggctgggcgctgggggaggggacaaggagagttagggtttcatgggtacagagttgtagttctgttgtgtaacagtgtgaatgtacctaacactacagaaactatacactgaaaaatgggtgagatgggcccggcgtggctgctcacacctgtaatcccagcactttgggaggcctacgcaagttcgactgtagcctgggcaacatggtgaaaccctgtctctacaaaaaataaaaagattacctggccctggtggctcacacctgtaaccccagctactcgggaggctgaggtgggaggaatgcttgagcctgggaggtggaggttgcagcgagccttgacctcaccactgcactctagcctgaatgacagagccagaccctgtctccaaagaaaaagaaaaaaaaaaaaaaaggttgagatagtaaattttatgtgtatctttccacacagctttttgttgttgagacgaagcccaggatggagtgcagtggtgcaatatcggctcactgcaaccttcgcctccctggctcaagcgttcttcccacctcagcctcccaagtaactaggactacaggtgcatgccaccatacctggctaatactgttgtccacagagatagggtcttgctatgttgcccagactagtctcgaactcctgggctcaagcaatcctcctctctcagcctcctgaagtgctgggattacaggcatgagccactgtgcccagtccacacttgacatttaccaaaaaaaaaaatcctatattatagtcccagtgagtggtgaggttaccacccgatatcaaacaatattttcatagcaaaataaatactgagcaagagcaataaaggctatcagtagccctgtgtcagttgaggttgggttttgccaccaagtaaatatagaagactaactgctaatttaggggggaaaaccttggtattcagagactgtgtcagagcttggaattgcagataagagacatgtggttattaatgtaacagagtgataatcctatcgggggaggcatttcctgaaggcccttggggagggcatggccatcccctcctctcccacctgcaggtcccagccatggtgggacgaccatacctcaggtcctcgcctcggtcagcacacttgtactgcagctggccgggcaggctggccaccaaggctttgagctgcaccgtctccagggctgcccagatagcctcgtccgagtgctcctgcagcaggtcgaggttcatccgcagagagccagggaacaggatggggtcctggcggggaggggcggtgggtcagagccgggtcccaccatgcctcccatctttgcccaccccctccaccagcctcacctgggggatgatgctgatcctggagcgcagtgtgtgcagccccacgtgggcaatggggaccccgtcgatccagatcccaccctcagctgcctcctggagccgcagcagcccactggccagggaggacttccctgccccggtcctgccaacgatgcccacctgcccggggttgggaggaaaggcctgctctgaccagagggtttgtgggcatttattggggagatctttctgctgtacccgagatctgtctatccatccctcattgtgtaaaggtctaccttccatctctctttccatctgtctacctttctatatatccacccatcaatccatccagtcttccatctgtgttcttctctatctttcccttatcctgatatctctctcccatctttctccccacccttcctttagttcctccatctttcctcatccttctatttacacctctccatcatctctcatccttttttctaccccatcccatccatctgtctgtccgtccatccatcccttatccttttttccaccccatcctgccatccatccatccatcatccatcctcaatcccatccctccatctctcttccaccccattccattcatccatccattcatctgtctatccgtctctcgtttcttcttccctattcatccatcaattcactaatcctttcattcatttattttctcccatccatccatccagtccatccttccctcatccatccttccattcatcctccatcttatccatgtgtccattctgttatccatctcccatgctgttatccaccctccatccttatctctcttgctactattgcatcctcagtgtctgacacatggtgtgggttcaacattatttgtttaattaatgatggaaacatgtgggtcaccccactgtatgccaagtacctgtttaggcaccggaagtatagaaattaaagagtccttgctccagtgtgcccatcatccggtctaggaaacagtgcaattgagtaaatgtaatacagtgtgatgaacaatgctttatttatttatttatttatttatttttgagataaagtcttgctctattgcccaggctggagtgcagtggtgcgatctcagctcactgcaacctccacctcccaggttcaagcaattctcctgcctcagcctccctagtagctgggactgcaggtgcctgtcaccatgctcggctaatttttgtatttttagtagacacgggatttcaccatgttggccaggctggtctcaaacttctggcctcaagtgatctgcccaccttggcctcctaaagtgctgggattacaggtataagccacagcacccagccaacaatgctgtttattatcaaggtctggacctctggcaattaagggaagcaaggcagtgctgctcatgctgcctgggatttgacagaggtaataagagaagacctcatggaggaagggatacttgcatggaagcttgaaggatcaataggagttcaaggaaggggaacactccaggtaaaccacaccaagtgggtttccaaaactagaagctcatggagctcacagcaccatgtgcccccctggccgagaggcagctgctccacaatgttggctaagccctggcagagcaatgaatgagagggggaggttggcagggcctgggttgggtagagccttgaatgccaagctcaggaattcacactttaccccaagggaagctggaactagtagaaggttttgagcaggggaatgacatgcagtgtcattcatgctgataaaggtcacaggatggctgggcatggtgggtcatgcctgtagtcccagcactttgggaggccgaggggggtgattgaggtcagaagtttgatagcagcctggccaacatggtgaaaccctgtctctactaaaaatacaaaaattagccgggtgtggtggcaggtgcctgtaatcccagctactcaggaggctgaggcaggagaatcacttgaatctgggaggcggaggttgcagtgatctaaggtcacaccactgcactccagcctgggcaacagagtgagactctgtctcaaaaaaaaaaaaaaaaaaaaaatcacaggagagcagattggagctggtgagacaggatccactgctttttaggggacaaggagaggacagggaggaagcctctgtaggttcagagggagggaggaaagggattcagtgaaggggcctgatgaggcatctgtaaaatgggatagtactagcacctcacttaggggttgttgtgagagtgaaaacgcaaataataaaagcattagtaaacatttctggagcactttctatgagctaagcatgttctatgtattaactcaaacttcacaacaactcagagatcagtattaccagtcccaatttacagatgggaaaactgagactgagctatgaagtgcttttcccaatgtctcccagctgaaagcaaatatcccatttgtgcaaactggaaaatgtacctggagcatttaacacactgcccagcacatattaggtgctgggttaatgttaaaggaagaaggaagtcacggagttgcttcctcatctggggacaccaaggtggatgaggaagtcaccagatggaagcaggtttggggaaggtgaggagttcattttagggggtaatgggtctgaaagctaggggacctgaggtggggacactgtggaggtagctggtgcccagggtttagggccttgtccctggagtcctttggcctaaactccatgaagaagacattgtgagagaaccactcaccttctctcctgcgtggatcttgaaggacacgccctgcacagccagcgggagctcaggtcggtatcttagcccaaagtcccggaactcgatctgcccgccctgaggccaggggggctgagctgcacatgtgggcagcctccagggagcctggagcaggaggggaaactgagtcagaggagccttcctctaagacttcacacaagatggcccacctctatcagcttcagttttctcttccgcaaaatggacgtatttattgctgttttacagggttgttatgggaattcaacaagagagggcatggactatgtcaatgctaaaaacagatggtggtggctacttttagtctattttattgttattattagccactgtttattataaaataatctctttttctatagtgggagcagacatttctctttgtctttgtgaaaggacatgactgtgcagtgggaagaccaatactgcctttgctgtgcccgtgaccttgaacagatcattctacccccttgagtcttggttttccaatctgggaaatagggctaataagagcagcagacatgtattgagtgtttgcaatggaccaggcactctattaaatcatttctttgcaggatctcatttgatcctcccagtaaactcaacgctgttatgttactgttacattagtgctatgctgctgttcttatcctttcttccacccaatcccatccatccattcatccatccatctcttatcctttatccaccccatcccacccatccatccatccatgcatccatccatccatctccaatcccatccctccatctctcattcttccatcccattccatccattcatctgtccatctctcaccatttcttctaccctattcatcaactaattaattcttccttgttctgttactgtaatgttactgttatattgctaacacattatatcatgttgctgttttgttaccgttgcgttgctatgttgctgttctgtccttataatgctactgttatgttgctggaattttgccatcatgttactataatgttgctgttttcttactgttacattgccatgttgctattccgttactataatttcagttattttgctggaatgttgccatcatgttactataatgttgctgttttgttactgttacattgttatgttgctactctgttactctgttacagtcgtgttgctgggatgttgctgtcatgttatgatgttgctgttgtgttactattgcattgctatgttgctgttttgtttctatcatgttactaaaatgttgctattacgttactattacattgctatgttgtggttgtattgctggaatgttgccatcatgttactataatgtctctattatgttactattacactgctatgttgctattctggtactgcaatattgtggttatgttgctgttacattactgttacattgctgttgcattactctcatgttctggaatattgccattgtgttgctgttgccattatgttactatcatgttgcagctatgttgctgttgcaatgctgttccttgtggttccctgcactcccatgggtgacctgctttcctcaagctcagaagcaaaggaaccaagatttggcctggctccaaaccttatgctcctaaccactgctgccaccctgtctgtgactctgacctatagtggtgggggttgagtgaggggagaagagggtataaactccaaagcctgtagcagatgtcaacagggacccattgccccccccacaatatgtccttgctgggaccccctccccacctcccgcccatcacctccttgggcgtccaggcatagtcctgcatccgctccactgacacgatgctgttctctaggtctgtccagttgcgaacaacccactgcagtgtctgggtcacctggtgcaagaaagcctctctggctgggtttggcaaggccacttgagggcttgcaacagcccccctggtttcccaaccttttctgggaggccagacccaggggagtaaagaggggaggcaggaatgggacagtctgaggacctgggcccaggggattgggatttggatacaaccaacaggtccctctcttccttcagtagaaccagagcatgcagagcaaaaagaagccctcagacatcagcttgtacaaactggcttgatgcaggtgagtagacaggatcagagagggtgtgtggccctcccaaggacacacagcaggacccaggcccactgattccattctgacggctttctcgcagcgactgggtggccaccaatttcccatgacacttagaaccactccaagctcctccctatgagccattagcagctctagccctgccatcccatccccaaccttgtctcccagcacccctgccttcacccaccctctccagccacacccgtcttcttgctgttcctctaacacaccagggatgaaccttcaactcccaggccttttcttcctgctgttaacctcacttcctcctaagtcacctcctcagagaggcctttctggatgcagtaggaaagttccctcactgccacccaacatgctccagcctcttacttcatccttaagcttagcagccttgactgtaaaatgaggataataacagtgcttctctgatggggttgtgggcagtattaagtgagttaatatttataaaattcttgtgcacagtggctcatgcctataatcccagctttttggaagtctaagcaggaagattgtttgaacccaggaattgaaggctgcagtgagctgtgatcacaccactgcactccagtctgggcaaaagagtgagaccttgtctcaaaacaaaacagctgggcatggtggctcacacctataatctcagcattttgggaggctggggcaggcagaccacttgaacctagagtttgagaccaggttgggcaacatggtgaaactgtttctaccaaaaaaaaaaaaaaaaaaaaaaaaaaaaaattagccaggcatggtggtgcatgcttgtagtcccagctaattgggaaagtgaggtgggagaatcccttgagcctggagatggaggctgaagtgagccaagatcatgccactgcactcaagcctaggcaacaaaatgagatcctgtctcaaacagcaacaacaacaaaccaaaacgaacaaaaacatataaagctcttagaataatgcctcctccataacaaatgcttatgagtgtatatatatatttttttcgtagatgtcatgaactgacattacatactgttaatagttaacaaaaattagccaggcatagtggctcacgcctgtaattccagcaacttgggaggctgaggcataagaatcgcttgaacccaggaggcagagttctcagtgagccgagattgcaccactgcactccagcctgagtaaaagagagagactctgtcttcaaaacaaaacaaaagttaacaatgcactagaaatgtcctccacaggatatgctttgtctcaactagtctttataacatcagaagtagtgggatttctggcctgtctttccaaggagcacactgacactccacaaggaaagactcttgcccaaggttgcaagttcaccttagctgagtctggctcttgtagagctgcgtgtccctccttggtggagggactccacacaccatggtggtttggacacagggtcttcaaaggtcccactagcaggggtccgacagtctctgcctctgtctgtccctcaagcccagtttggggatgtggggagtacctggagggcagcagagacagagaagcccacgaggccagcactgaggtgggctttgctcagcacagcacacgtggcagctgcaaacaccaggccattccccaggagctccacattggccgcaagccacctgcaaagggaagcgacagcagggtgagtggttactctcatctgcagggagatgcttctctgggcacaaggactggtcatcacaccagctttgtacacacaggggtcccagcaatggcctccacatgcaacccaggctcagggagtagaggaagatgacaccgtcctgtctcaactaagcccactttagggtctggggtacactcggtgttctgaagagcatccctgtgtggctgcttttctgtccctggaatttgccaagccatgtccacctgccattcccctggcctgaaccatggcctccatggtttggctctgtgtccccacccaaatctcatctcaaattgtaatccccacatgtggagggagggatctggtgggaggtgactggatcatgggggcagttttccccatattgttctcgagatagtgagttctcacaagatcatatggcgtaaaaggatgcggcagttcccacctcatgctctccctctcctgctgccatgtaagacgtgccttgcttccctttccaccatgattgtaagtttcctgaggcctccccagccacgtggaactgagtcaattaaaccttcctttctttataaattactcagtctcaggtagttctttttagcagtgtgaagatggactaatacacagccccagctggctggggacctgagatgaaaggaaaaaggacttcacatgtattgagcacctagtgtgtacttgaccctctccacactctggtaccagactgcttggattcaaatcctggctctgccagtattagctgtgagaccctggacaagtttccaaacctcactgtgcctaggatttatcatctatagaacagtttcttcctggtgaagctgttagcagaattaaataaattaatctacatagattgctcagaacagtgccaggcatgcagtaagcatgttacaggtcttacctatgagtgtctgtatttaatcctcatatccactccatgagcacgatcccagtttgacaaatgaggctcagagaggttatgtaacttgcctgaaatcaaccagctggtaagtggcagagctgggatttgaacctgtgtctatttgtgcttaaagcttgtgttcttgttcttgcttagtacctaaagatggctgaggatgcttatatggctgctttatcaccaaggcaaaagaggttgatccagttgcctggcaacagaagcttcttcctgtaccccccgcccacctgctgttgagaatctctcggtcatgttccatctgcccacggtgagaactgatagactgcctgtgggatctagcctcaactatgtccctgactctctgggtgacctcgctaccatacaatatgacctcaggtctcaccctctaaggatatggatgaattgcaaggtcttctctgccctggctcttcctacctgtcagccaccagtcgcgggaaactgatcctctggctttcatctacgcgagcattgttctgagccacaaagggggcctgggttcggaatgcccggaccactgtgctgccctggaacgtctcagccatgtgggagcagacagacgagtagctggctgactccaagcgtctcagctggcatgagctaaccacatacaggctctgagaaggatggatgggagagggaagaggagaagccacagacatagagaggtagtttccagaagcacagagagccccaagtacaggattccagaccaggatctgttaacagcttactgtgtgaccttgggctagttgcttgccctctctgggttctcatttccttgcagaatcagagttctatggtttttttgaaaatcacctggggagcttcaaaaacctctaatgccccaccccagaatgactgaatcggaatctctggaaatgtcaccttgactttggtgctgtttaaatagccttccagatgattctaagggacagccagggttgagaaaccaccaatttagtttaagtgtctcacttcccagcactgaggccgactacttcatttacggctggtcagtgggagaacaaaactgtaaggggcaatgaaggcagttggccaagtcagtttcactcatgtaacccaagggttacatgccaggtgatgtgcagaaaatattcgttatttggtttgcagctgcaggttgggtgcagctggcagacaggcaggcagggaggaactgaatttgctgaacacccaactgtatgtgccaggcttttcacacagtgtctcattcattgcagagtgagcattcgcgtcattcatcagttagtggtgagaacatccaaggctcgggggattcagcagctgtcctgagtgccacagtaagtgatagagcctggatttaaacccatctttgcttgactctaaagcttgagacagaaacagcccatcctcggagtcaagtgaacttagagaagacctaggacaattgtcggggacagtggtagccatgggttttgttgtttgttttttgagatggagtctctctctgtcacccaggctggagtgcagtggtgcaatctcagctcgctgcaacctctgcctcccgggctcaagcaatcctcccgcctcatcctcccaagaagctgggattacaagcatgcgccaccacactggctaaatttttgtatttttagtagacggagtttcaccatgttgaccaggctggtctcgaactcctgacctcaagtgatctgcccacctcagcctcccaaagtgctgtgattagatgtgtgagccaccatgcctagccctagccatggtttttatctgactaccatgttttctacttctggtttcctgtgggaaagggctgggttggggtgctgtcaatcatgggacctgatcagagaggtggtcacatgatgcagcctagtgtatcagaatctactatccattcagttactgtgacgagttcagagatggacacatgatccacaaagggccaatcagaaccttccctgggattaatatatgactactgagctgaagaaacgttttttgcatgttgagttgctaaggtgagatgatatgatagctagtggccataagacctgccctggaaagagagcgtgtacaaaattagaccagaggtaagccagtggttcctaaacatttgtgtacatcagaattacttggagggttaattaaaacctagattcatgggccgacccacatagtatctgaggcagtagtcctgggctggggcctaagaatgtactttgctaactagtccccaggtgatactactgctggtcctggggtcacactttgagaagcactgagtgaagatatggagagagtcactgtgtcctgatgacaactgggcccatgcccccaaggaaatataagccattaaattctattcttttggttaagctaattttagttggtcgctggtcccagcaattgaaagaatctagcttcatataatagcctttgagaccttgcaatgcctttttggcttccagataattggagaggaagaaattacggcaggataaaaacattacgcgtgaaaggctctggcccttaatatttaactgtgccgtggggcacaggggctcatgccctgtaatcccagaactttgggaggccaaggtgggaggatcacttggggccaggaattcgagaccagcctgggcaacacaggaagacacttgtcctacaaaaataaatttaaaaattagccagtcatggtggcacgtgcctgtagtcccagctacttgagaggctgaggtaggaggatcacctgaacccaggagttcaaggctgcagggagctatgatcacctattgcacttcagccttggcaggagagcaagattctgtctctctaaaaaaaagaactttgatgtgaacatttagagacagacactagtggagataccagaaagactgtagtgtccctgtccctgggaattctaggaacagcccctagatgtccagctgggtgaaacctcatatatggagtcttccccagagacaggggactggctgagttgacctcagccggtcccggaagcctccctgacctctccgtacctgaaacccagcgtagaggagaaacagtggcaggatggccacagtggccagtggggtagccactgccaccaccaggctgacctccaggagtccaaaggcgtacatcagcagggaccggagtttgtctggaatgtccacgtcaaccgtgtctgtctccttggagaagcggtttagcaggtgaccaatgggtgtccgctcaaagaagctgatgggagatcgcaccacatcccacaggagcctctggaagagcaacctggatgcccgggccccacctaggagcaccgcagccatggaggcaaacagcccaatggctggggagggagaggaggtaagagcatgagggctggagaccctcaggagcggcccacggggccctgcgcaggtctctcccgctaccccatggtggacatcttatggcttggccaccctgattattatatttttttgagacagggtctcactctgtcacccatgttgaagtgcagtagcatgatgatggctcagtgcagccttgacctcctgcactcaagcgatcctcctgcctcaccctccgagtagctgggaccacaggtgtacgccaccatgccggctaatttggggtatttttgtagagatgggatcttgctatgctgtccaggctggtctcgaactcctgggatcaagtgatctgcctgccttggcctcccaaagtgctgagatgacaggcatgagccactgcgcctgtaccctgcttgtttcttgatgtaatgggttgaagagtgtcccccaaaattcatttgggatgggtcctaaattcagtgactgccatttatataagaatactagaggatactcagagacacagcaggagatatgaagatggtgacacagatgggagggtgtatctacaagccaaggaatgccagcgactgccggcgaccaccagaaaccaggagagaagcctggggtgtattctccatcagagcctccacgaggggccgggcacagtggctcatgcctgtaatcacagcactttgggaggccaaggcgggtggatcacctgaggtcaggagttcgagaccagcctgagcaacacggtgaaaccctactaaaccctactctctactaaaaatacaaaaattagctgggcgtggtggcaggcacctgtagtcctagctactcaggaggcttagtcaggagaaacactggaacccaggaggcagaggttgcagtgagccataagccgagatcgtgctactgcactccagcctggttgacagagcaagactccgtctcagaaaaaacaaacaaacaaacaaacaaaaaaaccaaaaaaacctccacaaagagttaacactgctgacaccttgattttagacttcaggcctcagaactgcgacagaacaaatttcaattgtgctgggctcccaagtttgtggcaacttgtttggcagtagccctgtgagagaaatgcacatccttcctcccagtgctaatctgtatgcctggggtggggctaacttctcctctggggtggggcaaatttcatccatggccaatccaaaccactgcagttggttcagggatgaacacataacccaagtcaggccaatgacagggagacctgggacttcactagaacttttggaaaagtggtacttggttgttggaggtagccaagctggagctgtggaatatcatcttactgccaggggcagcagctaagctggacaggaagctgtcacagaggagggaaataaagcgatttcttgtttggacccctacatccagccatacctgaagccagaaatctagggatactggtcccaagagccaatcaattctcttgttgcttaaacactttgaattggagctgaatttgtttattttcagacggagtcctgctctgtcacccaggctggagtgcagtggtgcaatctctgctcactgcaaactccacctcccaggttcaagcgattctccttcctcagcctcccaagtagctgggattacaaacactgacaccatgcctggctaatttttgtatttttagtagagacggggtttcaccatgttcgccaggctgatcttgaactcctgacctcaagtgatccacccgcctcggcctcccaaagtgctgggattacaggcatgagccactgtatctggcctggagctgaattttttattctttgtattcgagagtcataaccaatttctctctctcagctcccatctctccatctttaggggagagtaagacttgcccttagctatcaaatgagggatggaagtggaaggattttgaaagggctatttgccacccaaatgaggatttgggttaattccagggctcggctgactctgagaatccctaatttcctcttggttaagtaaccattcgccttgagtattccactgtacatgcagttgtggtgagtaggtgtacaggttcttaggactagaagagtcctcaagttcaggcctggcgccccctattttacaggggaggtcacaggctcacagcattttggtgatgtggccaatgtcacccagtgaatgaggacgaatcaacatgaaaacgaggcaactgtcctttaaagatgaagccaggccgggcgtggtggctcatgcctgtgatcccaacactttgggagtttgaggcggaggattgcctgagcccaggagtttgagaccaggccgggcctggtggctcatgcctgtgatcccaacactttgggaggttgaggcggaggattgcctgagcccaggagtttgagaccagcctgggcaacacggcgaaactgtctctatcaaaaacaaaaattagccagcatggtggcatgtgcatgtagtcccagctactcgggaggctgaggtgggaggattgcttgagcccaggaggcagaggttgcagtgagccgagttcgtgccactgcattccagcctgggtgacaaagccagacccagtctatatatatgtgtgtgtgtgtataaataagaagccaaactcacatgtgcactcctgttactcccttcagccaggccacgtattaaaaggagaagaaccaggggttggggacagggtgggcgaggcaggagaagggtgggtgtggttgcaaaagggcaacacgagagcgcctcgtggtgacggtgttgttcagtatctcaactgtcaaccatcgtgatggatgcgagagactgaacaggggatacgactgcacagaggcaaacatgcgcacacccacgtgcaagcaaaactggggaaatcacaatgagatccatagggccgggtgcgggggctcacacctgtaatcccaacactctgggaggccgaggcgggcagatcatttgaggtcaggagtttgagaccagcttggccaacatggtgaaaccccatctctactaaaaatacaaaaattaaccaggctgcacacttgtaatcccagcttccagctactcaggaagctgaggtaggagaactgcttgaacctcggagatgggggttgcagtgagccgagacggcagcactgccctccagcccgggcaacagagcaagactctgtctcaaaataaaataaacaaataaataaataaataaataattgagatccatggattgatgggtgtcaggatcctttgtgtgatactttactatcagtttgcaaaatatcaccaatgggagaaactgggcagactgttcaaggtagctggctgccttatttcctagaactgcatgtgaatctacaattatttcaagaagaagtctttccatttttgacgaggagaagaaggagtgatagcggtgatgcatttgttagggagggtctggctctgtctggaggtttgggggcaggcactgaaagccaccagcaggcaggccttgcagacgccttccgctagtggggagggactgggagaggttctgaagcttccagaaaaggagggatgtgccctgtccttcccgttccctccagcctcatcttaaggacacagatctttgcctggaccccagacgttttgcacactgttccagggggacagggtgacccagggaggggtggggtaaaggagtcctgagcaccccttggtgcagctgggaggagagggatgaggagggcaggtgaggcgtaccttggagacagccgaggagcccgaagatcccgccacgcagggctgcctgcgtctgctgcccacctactgcagggtcgtccgcccacaggctcagccagtagccccggcagaaggaggccacttgctggcagaggaagaggaagagtgcgtagaggcagaggggggtgcccacggcacgcaggtaggccaggtgcactgtggccttcacctgtagcacacatgagggagagggaggcagagagagcccccagtgggaggggtgggttgaggcaaggccaggcgaggctcccagaaaacatgcccatggcagatgggaccaccacgcagacctcaccggttctcccgctgtgcctcccaccaggagcaccatttccccgacaggccccagccagccttagaacccccatctcctatacaatccccagggagctagtattaatattttttcttttctttttttttttttgaggacagggtcttgctttgtcgcccatgtcacccaggctggagtacactggcatgatcatggctcactgcagccttgaactcctaggctcaagtaatccccccgcctcagcctcccgagtagtcaggactagaggtttgtaccaccatgttttgttaattttcatagttttaaagagatggagtctcgctgtgttgcccaggctagtctcagactcctggcctcaagcgatcctccctcctcggccttccaaagtgcttggattacaggtgtgagccaccacacccagctagaagggttttcttgaacacccaccataggtcaggcatgtgtctctccttataacaacctccatttcacagataaggaaactgaggcacagagaggttcagccactggcttaaggtcctgctcctacaaatctgaagttctctgcacagctgcagccaggcgggactgttgaaaacattaatctaattatatcttgtcgttggcctgtccatggctatctcttgctcttagaagaaatcccagccaggaggggtggctcatacctgtaagcactttgggaggccaaggcgggtgtgtcacctgagctcaggagtttgagaccagcctggaccaacgtagtgaaaccccgtctctactaaaaatacaaaaattagccacgtgtggtggcaggcacctgtagtcccagctactcgagaggctaaggcaagagaatcgtttgaagccaggaggtggaggttgcagtgagctgagattgcgccattacactcttctctgggcgacaagagcgaaactctgtctcaaaaaaaaaaaaaaaaaaaaaaaaaaaagaaagaaagaaagaaagaaagaaattccaagcttcttatctcgcccccactcactgcctgccagcctcatgggacccctttctctggcaccctaagctacttcccacctcggagccattgcacctgctgctctctctgcctggagcgctctttctcctgccctttgtatgattgattccttcacacattctttggggaagctcaaatgtcacttctcagagcatcctgtccataccaaccatggtatggtttctcagtggtctctatttcatcattctttcttttaagaggcagggtctcactctgtcacccaggctggattgcagtgacatgatcatagctcactgcagcctcgaactcctggcctcaagcaatcctcctgcctcagcctctgaaagtgttgggattacaggcatgagccactgcgcctgatcattcttattttctttatagcacttattgttattggacatagcttacttattagcataattatttactctccgtctatcctcactagtgtctaatctctaccagacttagcctggcacatagtgggtattgtgtacatgtttgctggatggatgaggagggtaggtgggtgaataaatgagcgggtgggtaggtaggtaggtgtgtgaatgagtggatgaatggatggaaagatcaatgaatggatgaacagctgaacagacagatgcataggtgagggaatggttggatgtattgttaggtgggatagatggatgggtaagagaatgggatggataaatgagtaggtgggtgagtggatgggttggacagataaatgagtgggtgggatagatggataaatgagtggatgggatggacagataaatgagtgcctgggatggatggataaatgagtgggtggggatggataaatgagttggtgggagggatggataaatgactaggtgggatggatggataaatgaatgggtgggtgggtggcatggataaatgagtgggtgggatggataaatgagtggttgggtgggtgggatggataaataagtggatgggatggataaatgggagggtgggatggataaatgagtaggtgggatgcataaatgagtgggatggataaatgagtgggtgggatggctaaatgagtggnnnnnnnnnnnnnnnnnnnnnnnnnnnnnnnnnnnnnnnnnnnnngtaggtgaatggatgggatggataaatgagtgggtgggatggataggtgggtgggtggatgagcatctaggtggatgatggaatgggtaagtaggtgggtggagatacatagcagtatagaagatgagaaacagtgtaagcttcagactcagattggcctagatttgagtcccaggttgtgtcccaggctagatatgaaaacacaaacaagtctcttaactctttaagacttcagtttcttggctgggcacagtggctcacacctgtaaccccagcactttgggaggcagaggccagaggatcacttgagcccaggagttccagaccaacctgggcaacatggcaaaacccatctctactgaaaatacaaacattagctgggcatggtggcacacgcctgtagtcccagctacttgagagactgaggtaggaggattgcttgagcccaggaggtcgaggctgccgtgagctatgattacatcactgcggtccagcctgggtgagtgagcgagccactttctcaaaatcaaaataaaataaattttaaaagaattcagtttctttatgtctgaaatagacctatcatatctattttttagggtggttgtgaggattaagaaaatgaacatctagaatgctactggcacatagtaggtgctcaagaaaggtgagtatcactgccaagtgctacatttggtgggaggacttgggcccctggaggtggcacagtgggtggggaggggtgggtgaagctggtggttaccctgccgtattggatgctgtcctttcctgctggccatcctgccctgtcagggtcatccagaggaacctctgtctgggcttctgaagtggtacggtccttctcagggactgacttgatggacctgtcatttagaggaaatgaagacaaagtcagtatctctcccaatggtggggtgtatgtgcctaaccctcaggcccactgacagccactgagctctgggtacactctgtactctttcattcattcatttatctaacagaatactgaccagatatcacacttcccttcttcccatatggtacccagctaaatgccatctattaccccagggtcaagcaagcccattcttctgatgccaattcacaggatgaacttaacttgcccaccattggaactctgttctcagaattttctttcttttttttttttttttgagatggggtcttgctgcattgcccaggttggtctcaaactcctgagctcaagcaatccacctgcctcagcctcccaaagtgctgggattacaggcatgagccaccatgcccagcctgttctcagaatttttattttggcttaagctttcgtgcaattgttttgttcctactgtataccatcagatttgtcagtccaactggcagaatataaattatgcacaattcagatgctaaagactctttgaatgttttatctgtggatgagtaggctgacttaacctctgtgcctcagtttcctcagctgtaaaaataggaatattatctatctatccatccatccatttatccattcatctacatacctgtatatctacatatacatgtctacctaccttctattaaattgaggttagcccaaagctgcctccttacatattttaagtttggcctaaaggttttccccgtacatagtgaactgtaacctaattggactcaaacagactgcaacctactcctgtgtcaatcactgagtttcagccaatcaaaggcaaccaaccgttcaaaccatgttccaataaagcaaacgctgagctgtaaccaatccggctgtttctgtacctcacttctgttttctgtccttcaccttcctttttctgtctattaatctttgaccccgtggctgtaccagagcctctctggacgtattctggttcagggactgcccgatgtgcggatcattctttgcttagttaacctctgttagccaggtgcagtggctcacgtgtgtaatcccagcactttgggaggctgaggcaggtggaacacctgaagtcaggagtttgagaccatcctggacaacatggcaaaaccctgtctctactaaaaatacaaaaattagccgggcctggtcacatgtgcctgtagtcccagctactcaagagactgaggcatgagaatcgcttgaacctgggagacggggattgcagtgagccgagattgtgccattgcactccagcctgggcgacagagcaagattctgtctcaaaccccgccccccccgcaaaaaacaaaaaacctcagacacattaaatttgctagaggttaatttggcacaatctcggctcactgcaacctccgcctccgaggttcaagtgattctcgtgcctcagcctcccgagtagctgggactacaggcacatgccaccacgccggcttttttttttaaatttacttattttttatttttagtagagacgggttcaccatgttggccaggctggtctcgaactcctgacctctagctagtgatccacccgcttcagtttcccaaagtgctgggattacaggtgtgagccaccgtgcccagccttaatgtgtctactggttttcttttaacatgactacctatccatctgatcttacttcagattcttgtgcgctgtgaaggtggtgggatttctcagtgtgtgtgtgattgagaagtgccctcagggtggctagctgggatgggggtcagccccaatggtccctggggactgaggcccctcaagatcgctgccgcccaccacccctgtatagcaggcacttaagctcaggccatctggtatcagtggcctgttgttctgcttcccaagacccctctcattaagaggggagagtatcaggcagcaggtccttctgctgcagacagctccacagtgaacccagctgtgtcctggctggagggagctgagaaaagaggggaccggaggcctcctcctggccccttgcccacgtgttctggccagcgtcaagtgatgctgtgcatacagacccaagccctgtgcatagccagcctgtcaaagcataagtggccgggcctggcatggtggtttacagctatggggaggaaccagtcctgccctactgcagcattcagacaactccagcaagctggcctcggcccacttgaagacatccatcaattggaaggcatattgttcattccatgaactggccttatgggggcctaatcatcttggctaactggaccaattttggtaaattatccctcagcagggcaccatggggggacttcagcaggttctctatccataatggttttggttgcccgcctaactgcccgagatgcgggtggtcccttcagctacttcagcttcagcctgtgcccttctgagtgtggcaccatggtggactcacctctcgcgtctaagctcgggcctcctgcctgcagaggtgcctctggggtccttggtgctggtcccaggttctgtttctgcaaggtcaagagagtcctgtcacgcaacacggcccagatacccactttgacacccactgactatgtggccttaaccgctctgaccatccatttcccctgatctggctcctgccacgtctccagcaacctctctcaacaccccactctgagttcttccaggaacatccttcaggcattcactcactcattcatttcttcaatcagtgataactgagcacctactatgaacttgaggttggaaaaacagcatttaacactgtacaaagtcaagttacctctgtttcccccaacagccttgctcaagcagttccttgtgtctggaatgctcttttctggctaactctcacctaccctcaggtaccatctcccctaggaaggacacctccccaccactatcccccaggtgtggccagtaactgaaagcaaatctgtagtagtttaaccacagacctgtaagcaacaagtaactgctactgtaagctgctaggatttggggggctatttgttacacagcatcatcacagcaaaagctgaccaacacaaacaggcaagttctatcttcaagcttcaggactgtgacattgtgaatcaacacttaaggttttaaccaggttgggccagtgctaagcagatgttctcagaagaagcaaagcctgagattgagggagacctggatgtgaatccttgctttgtcatgaagggatagtgtagagggtagcaattaaaaaacacattctctggaatcaagttgcttgggttcaaatcccagtgctgccacttacaagccatgtaacctgggactagttccttaacttctgggcctcagtttcctcatctgtgaaatggaaatgattctagtaccagcctcacaggggcattatgttgattaaatgagctaacctctgtgatgtgctgttagttgctacttttcagtcattgtgagtgagcttggcttggcaactttacttccagaaccttgccatgtatccagcacactgtttttttggattattagaaaccctagctagcatggtgtagcttgctaggcatcaaagtccttcttgggctgtctccatagcaactgcaagcatagactctggagctggacatactcaagttctaatcttgtgaccttgggcaagtgatttaactctctttgcctcagtttgctcatctgtaaaatgacagcaataacttcacatgcctctggggcatgtgtgagaatcaaatgaaatagtgtattttttacagaagcacttagcacaacccctggctcatggatgatgttatcggctattcttggagaaaggtgacctattaagagagctgtctgcttccaggcctaggcctgcagacagggtgtggccagagcactccattcatgccagtaggacccttcgagccttttcccccaagggtggcaggagccaggcctggagaatcagcaaagcccacctagtacctccttctcctctatctcctggctgtctggcttgatccagaagacacacgagggcccccttcctctgcagaagctcctggtaggaacccatctctgcgatggccccatttgccagcactatgatccaatcagcctggggcaggatgtggagtgcgtgcgtcacgagaatccgtgtctgggcagggaaggggtagaagttacacacatgtggccgggtgcagtggctcatgcctgtaatcccaacactttgggaagccaaagcatgtggatcacttgaggccagaagttcgagaccagcctggctgacacggctaagccctatctctactaaaaatacaaaaattagctaggtgaggtggcgcacacctgtagtctcagctactttggaggctaaggcaagagaatcacttaaacctgggaggtggagcttgcagtgaggcgagattggaccacagcactccatcctgggtgacagagcaagactctgtcaagaaaggaaagaaagaaagagaagaaaagaaagaagaaaagaaaagaaacaaaggaaggaaggaaagagagagagagagaaagaaagaaaaaaaaaatgtacggccgagcgcagtggctcatgcctgtaatcccagcactttgggaggccgaggcagatggatcacctgaggtcaggagttcgagaccagcctggccaacatggtgaaaccctttctctactaaaaatacaaaaaattagctgggcgtggtggcgggcacctgtagtcccagctactcgggaggctgaggcaggagaatggcgtgaacccgggagccggagcttccagtgagcggagatcgcaccactgccctccagactgaaagacagagcgagactccatctcaaaaaaaaaagaaaaagaaaaaagttacacacatgtgcttggccagcctcctgagctgggggttggggtgggggtattgtccctggactcagagtggggacagctccccttcttgtgctcctgccgcctttcttgtaaacagcatatccaaatagagaaacagaggggactcccttagcctgtgtctcaaaacaagaagacaaggagtacatctgaccctggccaatcatccaaggcaaagctgtagtagttaaatcacagatccataaggaagaaacacctgctgttgtaagctgctgggatctgggggttgtttgttacatagcattgtcacagcaaaagctgaccaatacaaagaggaaattggactcaagtggaagggggaggtgagataaacttgggttaggactggatgctaagtgcttcctctgcctttgccctgtactgtctgacacatgttcccaaacttactgttccctggagtagcccaccaggcccaatgacctggttgaagacatgctggccaacgtgggcatccagggccgccagggggtcatccagcaggtacacagctgcctttctgtatacagcccgggccaggctcagccgctgcttctggcctccggagagattcatgccctgtggccacaaaaggaacagtggcctgagtcagcatctacagggtgaaactggggtgcccaggctgtggcaggtcagggcacacctgcccatcagggtgaggtacagctcaacatgcctattccctggggacaggcccagcttccaaggcactcgctctcaagccaacaatgcctccatccttacccgacctcacttctccacttcccaagcacgcttcctggaggagttacctacacttcccaatccactctgtctcctcctgctcactctctctatctctttgagtccaactcttgtttccctttctccactgagaccaccatccatttccctattccctcatccagtggcagcttttcagtcctacttttgtattttaaattttaattgttttcttttagttttcattgatatgtaatagttgtaactattcgaggggcacaagtggtatttggatacctgtagggcagtggtccccagcctttttggcaccagggaccagttttgtagaagacgatttttccatggacctgggggcagggggatggtccgggggatggtttcaggacgattcaagcacattacgttgattgtgcacttctattattattattactgctgttgtcgttgttattattgagatggagttttgctcttgtcacccaggctgggagtgcaatggcatgatcttgactcactgcaacctctgcctcctgggttcaagcaattctcctgcctcagcctcctgagtagctggaattacaggcacccactaccacgcctggctagtttctgtatttttagtagagatggggtttcaccatggtggccaggctggtctcgaactcctgccctcaggtgatccgcccaccttggcctcccaaagtgctgggattacaggcgtgagccactgcgcccggcctacttgtattattattgcattgtaatatataatgactcaccatcatgcagtatcagtgggagccctgagcttgttttcctgaaactagatagtcccttctggggatgatgggaggcagtgacagatcatcaggcattagattctcataagatccctcacatgtgcagtttacagtagggtttgtgctcctatgagaatctaatgctgccactgatctgacaggaggtggagctcaggcggtgatgggaacaataaggaatggctgtaaatacagatgaaacctcactcgcctgccctctgcccacctcctgctgtgctgcctgcccagttcctaacaggccacagactggtgctgatccatggcccgggggttggggacccctgctgtagacaatatgtaatgatcaaatcagggtaactgagatagtcatcacctcaaatatttatcttttgtattgcgaacacaaccatccttctcttctagctatcttgaaatatacaagtaaatgatcattaactataatttcccttgtgcactattgattactttaacttattccttctatctaggccttcttgtctttcattcattcttttaaaacttatttttatttatttttgagatggagttccactctgacacccaggctggagtgcaatggcttgatctcggctcactgcaacctctgcctactgggttcaagcgattctcctgcctcagcctcccaagtagctgggattacaggtacgccaccatgcctggctaatttttgtatttttagtagagatggggcttcaccatgttggccaggctggtctcaaactcctgacctcaagcaaccctcccgccttggcttcccaaagtgctgggattacaggcatgagccaccgtacccagccattcattcattcttacattcagtcattccactaataaccactgcctcgttatcataaaccaggcatggttctaggctctggagaaacagcaatgagcaaaacaaagttgctgctctcttaatggatccatcattctcatgaaggggacagagacaggcaatccataaacaagtaaggcagacagcacatcaggtggaaagtgctatgaagaataaatagtaaagcagggggagccaggttcaggggctcacgcctgtaatcccagcactttgggaggcggagctgggtggatcacttgaggtcagaagttcaagaccagcctggccaacatggtgaaaccccatctctactaaaagtacaaaaaaaaattagccagttgtggtggtacatggctgtaattctagctactcatgaggctgaggtgggaggattgcttgaactactcatgaggctgaggtgggaggaatgcttgaactcaggaggtggaggttacagtgagccaagattgtgccactgcactccagcctgggcaacagagcgagactccgtctcagaaaaaaaaaaaaaaaaagagaaaaagcaggtgcaggtgtagggtgcactaacaatagtagggtggctgtggtggtagataaggtggtcaggaaaggcctctctgtgaaggtgatagaagtgagggatgagccctggggactcctggggagagctttccagcagagggaacagcagtgcaaaggccctggggccagagtgtgctgtgggggatcagggaatatcacagagactaaggtggctgcagtaaagctgagaggtgatgatgggagatggggctaatggataccagagccaggtcacagggaccttgccagggattgtcatgacttgggctttgtctctgaggtaaatggggagatcacctgaggtccggagtttgagaccagcctggccaacatggtgaaaccctgtctctactaaaaatataaaaattagccaggtatggtggcatgtgcctgtaattccagctactcaggaggctgaggtgtgagaattgcttgaacgtgggaggcggaggttgcagtgagccgagattgcatcactgcatgccagcctgtgcaacagagcaagactctgtctccaaaacaaaacaaaaaacaaaaccacaagtggtgggctggatttggcttggggtcacagtttgccaacccctgcccaatccatagctccagatgcatatatcctgtttcttggacatctctgtccagaccccttggtgaggcccagagaggggaagcaattacaccaacattactcagcaaggcagggcagagtaagacaggagtctaggtcttctcactctcagttgtcagagagctcctcactgccaatccctgccacaactccctgcctctctctttgtgtctatttctgcttatcaattagtgattacgtattgagcacctagcacgtgcttgacgctgagctgagccctttttctccgctacttccctaaccattcctctcatttctccatcatactgcccatgatgagtcggggacccaaatgactcccaactgcaatgtctccctgtcccaaaaagacccccaaactctcacctgctccccaattgaagtgtggattccctcagggaagctgtccacatctggctgcagggcacaggcttctagtactctctccagccagggtgggtccagctcctgcccgaagcacacattctctaccacagaggtgttctgcacccaggcctcctggggcacgtaggccacagcaccctaaaacacaacttactttggtcacaggaggatgatggggacagaggtgggataggttttgaggagcagtgggagctgggctctcagtggtgggtgagaggtggagagaatgagtgaaagtgaacttggctgggatggggagggtgggaaggcagcgaggaagtgggactttcaggatggggacatcctagcagacaggctgggggtggcctcacctcgatgctcacgaacccctccacctttgacagctccccaaggagggcggacagcagggaggacttccctgcccccactggaccgacaacagccagcagacagccctggggcaccgtgaggtttattctggacacgcaagaggggagacatgaccttggttagggttcagcccgcctctgtgaggaaggatgagccccagacggagctgagctttcctgctctgggagtctccaagaggacctgtggggctgttctttttcccagtccttgtctagctatttgaggaactatcctgtgcacatctgtgcatgtacacatgcacacaaagcgtgcacacatgcatgcacatttgcacactcatacaagcatgctagcatgcacagcaacacaatgtgggcacgcatccacacacacacaagtgcatgcacatacccaatcaatccatgctcacacgcatacatgtgtgcacacatgcacaccacgcacacacacacagggttgactatagcctgagggtttcaccagcctggcctcctgccttggctcttgcgataaataggctctttcctccctccctcccgctactcttggtcccgccccactcctgtccacgtcccacagcccatcctccacccagtgaccagagggatctgttaaaacccaagtcagatcgtgacacttcccagctaaacccgccagcactcccatttcactcagggtcaaagctaaagtcctgacgatcaggaatgacatctcccgcctccttccgctctgtgcctcagctgctcggccctggccttgctgacctccttgctgtttcttgaacacaaaaggccagtggttctcaccagggggtgactgcatcccccaggagtcatttggcaagatctagagatatttttggatgtcacaaccagtagggggtgctgctggcatctagtgggtagagactggggtcagctaaacatcccacaatgcacacgacagcccccaacaaaggagtttcagcccaaaatatcaaccatgctgaggttgagaaacccaggtccaggcactctcctgccccaggacctttgctgatgccattcccaccgcctagaaggttcttctcccaggccgggcacggtggctcatgcctgtaatcctagtcctttgggaactgaggcaggtggatcacttgaggtcaggagttggagaccagcctgacgaacatggtaaaacccatctctactaaaaatacaaaaattagctgggtgtggtagcatgcgcctgtaatcccagctactcgggaggctgaggcaggagaattgcttgaatccggaaggtggaggttgcagtgagccgagatcatgccattgcactccagcccgcgtgatagagcaagactccgtttcaaaaaaaaaaaaaaaaaaaaaaaaaaaagaacagctcttctcccagacactccttccttatgatctcggcttgaatgcaaagccttccctcgctagacatgccatcgtactctgttcccttgctctggttttctgtttgggcctcacctctatcagcatgtcaccccacgagagcagggcccttgtctgtttccttcgccctatccccaatacctagaacagagcgtggcccatacctagtgctctatcgatgaagtgagtgaatgacaaccaatacaaatactacctggggcatattccttctcttcttagggagtttcagggctgtctgagatttttggccacaaagaccaagcgatagagttggagactatagatgatcatgacctcggactgatacaggaggcacagaagtgagcacagctgatagggctgaaccttggggctcctctcagccagccctcccttggcatcgtcttggccagcctgggagcacaggggtgtctccccctaatgggggaggctcagatgccctggtccccgtctgcaggagatactggtctatgctgtgcaggtccccaccttcaggaggtagagatgtatcctgagaacctccccggcagagccccagcccagccaaacccaccctccagtcccaggctggaaacctacaccacctctcaggtgggaggcagcaggagccccatgcatcttctccctaaaaacatgaggctggttactacgggtgtcgttctgtacctgtggaggcagggagggctttcctgggaccaggcgaaggtggcactgtgtatggtgatgcaatccttcccggcagctgcagggcacaagaggccatttacaggagacccctgacctggccggcctctgcatcggagaggcccccaggcaccatcccccgccccccccaggggcagaggctgcaggaagaaatctctcccactgaacaaattgccctgctactcactggcttgtgggtgaccccgcagggttcttgttctgtccgtgtcccatggctacataatccagggggaggcaaactgtggcccagagaccaaatcctgcctgctgccttttcttataaataaagttttattggaacacggccacatccattcatttctctatttcatgctttgagcagttgtgacagagactgtgtggcccacaggcctaaaatatgcacaatctggtcatttatggaaaaagttagtgaatttctgaaataaattatcatcaaatcccagccttcccagagtgaagggggtgttattaatttcactgtggccggcacagtgtctcatgcctgtaatcccagcactttaggaagcagaggtggtaggatcacttgaggtcaggagtttgagaccagcctggccaacatggcaaaaccctgcctctaccaaaaaatacaaaaattagccaggcgtggtggtgggcgcctgtaatcacagctacttgagaggctaaggcaggagaattgcttgaacccaggaggcggaggttgcagagaaccaagattgcaccactgcactccagcctggatgacggagtaagactgtgtctcaaaaatactactgctactactactaattattattattatttcactgtgataacaagtgtaattagattagtggttcttgatccttaagacgtagttagaattgcctgaaagattttctaaaaatcaaagctctcatggcttagcccagatcaattaaattcatcgtcacaattagctgctataacgattaacatgcccattttggagatgggaacacggaagctcagagagatgatctacttgtcaggatcacccagctagtcagtgctggggctgggatttggacctgggcagttgaatgccacaggctcggcttcttaccactatgtgggtgttttccaggtacacagtttgcccaggttcttcagtgcaacaagggggagggtgtcttggcccgtggcataaaagaaggatggggtggagggggaagcccaggtaacttgagcttggtaagtctcatcgtgcaatggtgcttgaaatgctgctattttccagcttgatcaaaatgctgtcatgcttattacctgggactttctgcatgaggacaaggacctggtctgttagagcaggagtcctcaacccccaggccacagactggtaccagtctgcagcctcttaggaactgggccatacagcaggaggtgagcgcagggcaggtgagcagagtgtcatctgtgtttatagccactccccatcactcccatcaccgcctgagctccacctcctgccaaatcagcagcagcaatagattctcaaaggagcacgaacacttgtgaactgtgcatgtgaggaatctgggttgcgtgttccttataagaatctaatgcctgatgatctctgtctcccatcacccgctttggggccatctagttgacggaaagcaagctcagggctcccactggttctacgttatggtgagttgtataattatttcattatatagtacaatgtaataataataaagggcacaataaatggaatgtgtttgaatcatcccaaaaccacgcgcctctccccggtccgtgggaaaactgtcttccacaaaaccagtccctggtgccaaaaagcttggggaccactgtgttagagtgttccctgttgtacacccaggatggtacaaagtgggcgctcagtcagtggtcgctgaatggctagcagaaagaagagcagcacggtgccagtttccaagtgacacgcagatggcgtgatctgcacgtgtcatccattgcccgcagcccccatctccccccagtactgatgctggcttgccattatgggccggggtggcccccacatcccccatccctcccacacccctcctgccagactcagcactcaccgcttccagaggaacttgagtctacgacaccagggtcaacttcttccaggcagaggaaggtgaccagacggtcaaaggacacccgggcctaggaaaaccgaagccgcaggtcacccagcaagaagagcaaagaactcaggttttgggtgtcggtgtctcaagatgtgtggcaacagcttcctgtctaccaagctctgtgcataggaggcgtgaggacaaagctttctagttcatgggaaacgatgcaacccgagtggtgaccttgatggtggtgatctcccacctctgcgatcctacaaatcagtgacaccgaagcaagccagctgccattctgcagacaagatctgggaagaggatggtggcttttccaataaggttatcaagccattgtgtggaacaatttcaaatgttgtccacctgggggcgctctctcccagtcacaaacccatctttggggaagaaagagaccagtcgttaaaatagagattaggccaggtgcagcggctcatgccggtaatcccagcactttgggaagccaagtgcaggaggatcacttgaggccaggagttggagacctggggaacatagcaagactctttgtttctacaaaaaattaaaaaaattagccggatgtggtggcccatgcctgtagtcccagctactcaggaggctgggaggtagaagcatcacttgagtccaggagtttgagcatgcagtgagctgagatcgtgccactgcactccagcctgggtgacagagtgagacactgtctcaataaataaattaaataaataaataaataaataaataaataaataaataaggcggccaggcgcggtggctcatgcctgtaatcctagcactttgggaggctgaggcgggcttattacatgaggtcgggggttcaagaccagcctggcctggccaacatggtgaaaccctgtctctactaaaaacacaataaataaataaataagactgggtgcagtggctcatgtctgtaatcagcactttgggaggccaaggtgggcagatcacctgaggtcagcggttcaagacctgcctggccaacatggtgaaatctcatctctactaaaaatacaaaaaaaaaaaaaaaaattagctgggcatggttgtgcatgcctgtggtcccagctacttggcaggctggggcaggagaatcacttgaatctgcgaggtagatcttgcagtgagccgagattgcaccactgcactccagcctgggtgacagagtgagactccatctcaaataaataaataaataaaaataaaaaataaaaaacatggagatggctcaggtatgccgccgtttcttgttttcaccatgctgaaaggactagagatagcaaaggaagagaaacaaaatcgctttgtataaaaaagggaactgacatgattgcttgtatgtggaattgctgggcagatggacaagtatgcatgttctgaggtgtgtgtggaaaggtctgcacattgccctccaaaggctgaccccttccagatgtatttgctgtactctctgcccgcctctgttcttgcccctacccgcctcttttccagctccacaccatccctctccctcccactctgtcttccctctcctctgcaaatggcaggggtagggaagctggagccaggtgtagcccacgcactctcccaggatggctccagcccttgcacccacctcacctggacgagggagtggatggagaagggcaggaaagcctgggccttgttgaggatgttgagaactgtgagagtcacaaaggctttctctgcattcatagcattctcggccaccagagtgtggacagcaaacaccaccagtgcgacctggggggtgggggggacacgtggggcaacagtgagacacgcaagcatggatagggcagcctgggcaagctgtggtgcctgcacggtccatgtggcccacccgccatgtccgcatgtgcttccctccgtagatcccactcccagtcctgctaacacatgtcctctccgcagtcataagctacataaggctctctctaaagacacagcgcattgctaatggtgatgagtgcgcagccccacggctctaggcatcactagaacctaggggagaacctaatgcctctaggttccaggcatcgggggacagcagagtttttgatcttggtagccctgttgttctagacgtggtggaacttgtgattctagagtcccttggaagatgactctaaagttgcaggcaggagcagcacttgagggctctaggtgttggtgccatttgtggtgcttttttttttttttttgagatgaagtcttgctctgtcgcccaggctggagtacagtggcatgatctcggctcactgcaacctctgcctcctgggttcaagtgattctcctgcctcagactcccaagtagctgggattacaggcgcccgccactgcaaccagctaatttttgtatttttagtagagacagggtttcgccatgttggccaggctggtcttgaactcctgacctcaggtgatccacccacctcggcctcccaaagtattgggacgacaggcatgagccaccacacccagcctacgtatcaaattttttaaaactgtggtttaggaaggttgttctgacagcaatatgaaataaattacagaatggcaggacaaggatcacgtccagtgacagggtggctatggacatctgctggccaggatcagggaagtcactctgacccaggattctacctctgccacccccctgcatctgtaccctcctccccacatcggtagaagcctggaactctctctgagagttcagcagactttatcagccactgccacctttgctagaataatatgattaattagttcttgtagaagacagcagggacccagagagaacaggatccagaatgagtgggttttgatggacggggtggtaggatctggggggctccacctacctcaccctgcccccacccccgcactccttccccagtgctgctcagcatagagactagagtgacgtcaccagaaatgtagacacttggaaggacaccagcgacacagagaagaggaggccggaggtccgcaaggcgcccagctcctggcctcggatgcccaggactctgtccagaaaggctccctcccagccatggaacttgatggtcttcgagttcctgaggatagagctggtgagccgtgcccgtgagtccttctgcctcatttgctcctcctgggatcggagggaaaaagagagatgaagacagggacagttgagaattcttccctgcaccctgacagccacccttcagcaaatcccattcatctcaccaaactgcgtcccaaacctgtctgcctctcagcacctctgaccctcactcctggtccaaccaccatcatcctgtacctggacttctgcaggagtgcccctgggataatgtgccccacggaggaagcctctgatgcccggagaacagaggcagcctgagcccacctgggtatgacaccatcaggaaggctacctggaggtggttgatgcctgagctacgtctttttttttttttaccttttacattttttgtggagttggggtctcactatgttgcccaggttggcctcgagctcctgggctcaagtgatcctctgccctcagcctcctaaaatgctgggattacagcctgagctaaatcttaaatgaccaggaagtgcgtgctgagcaggcagaggatggggggatggagctggagaagaagggaggggaggggcttgagatgggggtggggggtgggggctggggggtaggggggtggcgggggcagctaaaacccaggcacagggaatagcatgactcagaggacactcagtgtgaccagaggaccgtgtgggcagggtcacttggcactttaaagtcaggcagaagaattcagggtctcttgtgcttcaccatggggcgggggcatcatcagaggggcagctgcctggagaaggttttactttttgagaccgagtcttcctctgtcgcccaggctggagtgcagtggtgtggtctcggctcactgtaacctccgcctcctgggttcaagcgattctcctgcctgagcctcccgagtagctgggattacaggcgcccgccaccacgcccggctaaattttatattttttgtggaggcagggttatgccatgttggccaggctggttttgaactcctgacctcaggtgatctgcctgcctcggcctcccaaagtgctgggattacaggtgtggcctcccaaagtgctgggattacaggtgtcagccactgtgcccagcctagaatgttttagaggagtccacgcaggaggctgaagaaacagcccaggtgacagacggacactgggacagctgggccaagagaggaaataagttccttccctccatcccccatctctccctctctctttcccgccttttctttccttccttccctatctcctttcttcctctttcctttgctttcttccctctttcatttccttccctccctcccccctttcttccttctctccctcattccttctcttcctccctcaattctttccttccctccttccctctgtccttcctcccctttcctatctttccttccctccctccttttctctccttcccctcccttcttcctctcctcctttccttcttccctccctcctttcttccatagttcacaaacacttactgagaaccttctgcctgccaagcactaactagatgccgagttggccacaatcagtggcctgtgctgttgcaaagcttccagttaaggaaaacaaggcaatcaaccctgccgggtgcttcctgtaggaccctgtatgttgtgggaagtgctgtggggggaaaaaagcaaaaacaatcccagggcaggcaaaggagaggctgctgctgggaggggagggatggacgtgccatttccttgctggagggtggtgagggaagccgccctgactgcagggaggtgacagaggatcttcgggagtgagggtgatccaggtggagggaacagctaaagcgaaggcctgcagggatgtgtgagatcgggcaggtttgaggatgggagatgtgtggggaaaggcagggaaggaggggagatgggtagaaggtgaggttggaagcaataaggccagctcagggcgggcctggtgggccactgtggggtctttggctcagtctgaggaaaatggggccgctgtgggtctgagtagaggaggggtacaacgtatttggtttgcataggtctcctctggctgggagtggagagaggctgagggcagaggcggggagtgagccaggggcttgctgctgtgacctgggttagagatcatggggtttggagagcctatgctgggaagtgtgacattttggatgcattttgaaggtgatgccaagcaaatctgctgacagatgggatgtgagagaaaaaggcattgaactgacccagggcctgtggcctgaacattggagggacggagccactgtccattgagaggatagggggagggggtgcaggtctgagtgatgggcagctcacagacgacaagaacaaagccagacccgtgggctcgcactcagctctcccctccccatctcccacaccaggacctgtggcttcctccctacttcctgcctggtccgtccctttcccaaaagccaaacctgatggtggttccttttcttggagatgaagaaattcagagggaggaggctcaggaagacagcgatggcagtgagggcggagggccccaggagctggggatagaaggggcaggatgtcaggagatcccgaggagcccagctctcagaggcacgtgaaccagagcaactccatcttgaatagggactgggtaaaatgaggctgagacctactgggctgcattcccagacggttagggtattgtaagtcacaggatgagataggaggtcggcacaagatacaggtcacaaagaccttcctgataaaacaggttgcagtaaagaaggcggccaaatcccaccaaaaccaagatggctacgagagtgacctcccgtcatcctcactgctacactccaccagcgccatgacagtttacaaatgccatggcaacatcaggaagttaccctatatggtctaagaaggaaaggcatgaataatccaccccttgtttagcatatcatcaagaaataaccataaaaatgggcaaccagcagccctctgggttgctctctctatggagtagccattcttttagatctttactttactaaaaaacttgcttttggccgggcacggtggatcatgcctgtaataccagcactttgggaggccggaggcgggcagatcacctgaggtcaggagtttgagaccagcctggccaacatagtgaaacacagtctctactaaaaatataaaaactatccaggtgtggtggtgggcacctgtgatcccagctactcgagaggctgaggcaggagaatagcttgaacccaggaggcggagcttacagtgagccacgatcgcaccactgcactccagcctgggtggcagagtgagactccgtctcaaaaaacaaacaaacaaacacttgctttcactttatggactcgccctgaattctttcttgcacgagatccaagaaccctcttttgggatctggatcaggaccccttttctgtaacacagctgcagaccccgaaggtggtcagacttgggtcctaagatggggatgtcagggaatctgataagggcagccaccaggtcccagggatctgtgctcatggggtctgctgtgtcaggagatgcctgctgaaggtggggtccttcaatgtcagggagggaaacagccctcttacacgatagggagagagttatattcaagacagattgtgcacacacacgagtgggactggggggtgttcccagccacaacagtaaagttgagacctatggaatcaggggacctggttcaaatcctgaccctgagagttttgagtgtggccttggggcaagtcatctcccttaggtgcaattctcttgtctgcaaaatgggaatagagttgttctcatttggcattttctcttattgcgtttaattattttcctaatcttcatttcatccctcgcaagggttgtcagatttagtaaatcatcatacagaatgcccagttacatttgaagataaagagtgaataaggttttagtctaagtctcgtgaaatatttgggacatacactgagaaattcttccgtttgtctgaaactcacacttcactgaatgtcctgtgttttctctggcaaccctgctcccccaccaacgtggtgattttgggatggttatcttccccctctcagctttggtttctatatctggaaaatgtggaagtggggggtagaataaatgatttttaagttgctgtgactttctgagatttctgcacaggttatttggacccattctcttgacaagccccaccccaactccagtctgtgtgcctcagtttcccgtctcagtccttaggaacactatgtttatttatttatttatttgtttgtttattttgagatggattcttgttctgtgacccaggctggagtgcagtctcatgatcttggctcactgcaacctctgcttcccaagcgattctcctgtctcagcctcctgagtagctgggattacaggcatgtgtcactcggctaatttttgtatttttagtagagatggggtttcaccacgttgcccaggctggtctcgaactcctggcctcaagtgatccacccacctcagcctcccaaagtgctgatattacaggtttgagccaccccacctggcctgggaacactattttctaacattgggccagtttgtttcatttatgcggcaatggcgctacctagtggctcaatggagaagggcgcagagggtaaacaccagcccacagcagggcttggaaaaacactcaaggaatgtgagcagaagatgaacatctctgtctgggggaaaaatggtatcattaaactgtagcaacctcagtgtccactcctccttcaccaagacctcacggtgatgttaggaactgtctaccaagaggcaggtaaagtacacaagcaaagtaacatggtgcattatctatggatatcttgttggtctcatctaattttttttttttttttttttttttttttagaaggagtctcactctgtcgtccaggctgcagtgcagtgatgtgatctcagctcactgcaacctccacctcccgggttcaagtgattctcctgcctcagcctctctagtagctgggattacaggcacatgccaccatgcccggctaatttttatattttcagtagagacagggttttgccatgttggccaggctggtcttgaactcctgacctcaagtgttctgccggccttcacctcccaaagtgctgggattacaggcgtgagccaccgtgccccgcctggtctcatctgatttttagcaacggtggggtcaacctgatcaattgccctgaattttcccacgttcttcctctctccctctctttcttcctaatgatgacatttatgtactgcacatgaagccctgtctgagtgccttatgttgtaattgctaagcacctgcctattgtttgcaaggccctggaatacaaggtgaagacactggaaaaagtcctggcccctagccctagcaaaaacaatcatatgcatgagcattcgagttttttttggaatattcagcaattacaatcaaaatgccattaacagtttttacaaggccaggcacagtggctcatgcccgtaatcccagcactttgggaggctgaggtgggcagatcacctgaggtcaggagttcaggaccagcccagccaacatggtgaaacccagtttctactaaaaatacaaaaattagccagatgtcgtggtgcacgcctgtaatcccagctactcaggaggctgaggctggataattgcttgaacctgggaggtggaggttgcagtgagccgaagttgtgccattgcaccaaagcctgggcaacacagtgagactctgtctcaaaaaaaaaaaaaaaatcaaaaggatactatttcacgacatatgaaaatgatatgcacttcaaatgtcagcatccataaatagagttttattggaggaataccatgcctgtttgcttagtatggtctacagccacttctgcactccaagggcagagatgaatatttgcaggagaggtggtgtggcctccagtgtaaaaagcatctactgtcttatcctttatggaaaagtaactaatgataatattacaaatacctacagggtacagttgtgtgcctggcacccttttaagtgctttctacatatgggctcgtttaatgcctcagcccctctggggcaggagtgctactgttaattatgatcctcacgttggagacaagaacaggaggcacagagagagtagggtccttgcacacagattcacaactgataagtggtcagaaggaggatttgagcctaggcagttcccgatacagagtctaattttatttttacttttatttatttgttggagacagagtctcactctgtcacccaggctggagtgcagtggcattatctcagctcactgcaacttccacctccaaggctcaagcgattctcctgcctcagcctcctgagtggatggggttataggcacccaccactatgcccggctaatttttgtatctttcagtagagacggggttggccaggctggtctggaactcctggcctcaagtgatccacctacctcaccccccaaattgctgagattataggcatgagccactgtgcctggcccagagtctgattttaattttaaaaaagaaaatcctataccacaacgttaaaggaatgaagttggaaagtaaatgttttgtttgttttgtttggttgtttcctgatggctactttgtgttttttgaacactaagtagcaatttttccccctaaaatgttctcctcttgtgttttgtggacagtggctatggtggtgcctcagggttactggtaacttcaaaacatggttaacttgcctactgggtaccctaatagcacatggggaagtatcaacgtcatcatcatcatctttctacagaggaaactgaggcccagagagggtgaacttcctgcccaaggtcaagtgaaggtcatccttattgaggacttttcccatcgtatcagacaatagtaggcaaattgagacaggattggaggaggaggagaaggaggagatgggggtggaaggggaggagaaaaaggaggagaggaagaagaaagggaagagaaggagagggaagagcagagggaagagagggaggacggtagaggagaagaagggagaagggaagaagtgggagggaagatgacagggagcagaaaggaagaagaaggtggagcaggagagaggaagaggaggaggagggggaaggaggaaaaggaaggggtgcaggaagaggagggggtgcgtgggcagaaggtgggagagatgcaggaggagggagggtgcagggaggggtgcaagaggaggagggcaggaggaggaggctggggcagagggagaggggaggaagccttatgagcttctacaccaggaatggaatccagggtgatgaaggcagaacaagggtaaaacctttcatgtgcctctctgacaccaacctggttctcccacagcctcagacttgccctaaccctggggtcacagcggacctcttccagcctcttgaatgctaagtcaggaggaggaagggtgggagggggaaggacgagggggagaaggagggggtgggggactccgttcaaatcccgtcttcctcctctggcatacctgccagagatagacgaagcagaccacgatccagacgagaggcagccacagcccgttgaggtagaggacgctctcggtcagccgctgcacgtccacggacaccagattgaccacatcacccaccgcactggcctttctggagccgctggacagagccaggacctggcgggtgggcagaaggagagaagtaaagtggggaggccggggcagagggatgccccaggtggcttctccacccactgagccccacctcacacgtctgcgaggtgggtgagtaaagtctcttaggccaacctctcagggctctttgaggatccacagagatgacaaaaatgaaaatcctccaagatccctaaagcacgggaggcataataatgaataacatgcacgaaaacaccagattaacacagataacggtggtcatctgcccagtgctcaccatgtcgcaggcactgtgctaaatgaacagccttatcctttcccggggtgctcacagccatgaatggtaccaagcaggcactaccatattcattccctctaatgccaggccaggtgcagtggcctctgcctgtaatcccgccactctgggaggctgaggtgggaggattgcttgatcccaggagttcgaaaccagcccgcgcgacatagtaagacccaagctctacaaaatactttaaaaaattagccagggggccgggtgcggtgcctcacgtctataatcccagcactttgggaggccgaggtggacagatcacctgaggtcaggaggtggagaccagcctggccaacatggtgaaaccctgtctctaccaaaaatacaaaaattagccgggcatggtggcaggcacctgtaatcccagctacttgggaggctgaggcaagagaatcgcttaaacccaggaggcagaggttgcagtgagcccagatcaagccattgcattccagtctgggcaacaagagcaaaatccatttcgggggggaaaaaagaaaaaattagccaggcatggttgtggtgcgcctgtggtcctagctagctactggggaggctgaggtgggaggattaattgagtacaggaggttgaggctgcagtgagccatgttggtgccactgcactctagcctgggcaacagagcaagaccctgtctttaaaaaaaattctatggataaattgctctctattattctctcaccaaggaaaataccacttccagttaaattaagacatgtaagagacatctcgattttggaagtattagagtgaaaaaaaaatgtgagacgagaatcaatgaaatgaacatttactaaccccattctatggctaaagaaactgaggcagagagaagttgagcaacttgcccaaagtcacaggccttgtaagctcctacacaaggaatggaatccagggtgacgaaggcatgacaagggtgagacctttcatgtgcttctgtgacaccaacctggttctctggcagcctcacatctgccttaaccctggggtcacagtggacctcttccagcctgttgaatgctaaattccaaatgcagccctccctttgtgactgcgtgagggtgtgaagaagtgatccaggaatgactggacatagaaattctccacttagcaagtctttgaagagtgctcactgtgtgactcacactgagctgggaactgaaaatacagctgtgaacaacagagatgaggcttgctctcccgggcctggagtttgaggtggggaacaaggctctataataaagatttatataactggccgggcacagtggctcacacctgtaatcccagcactttgggaggctgaggcgggtggattgcttgaggccgggagttcgagatcagcctggccaatatggcaaaaccccatctctagtaaaaatacaaaaattaactgggcatgctggtgggcacctgtaatcccagctatttgggagggtgaggcaggacaattgcttgaacccaggaggcagaggttgcagtgagccaagattgcaccgctgcactacagcctgggtgacagagtgagactctgtctcaaaaaaataagacaaaacaaaaatatttctaaaactcatgctttaatggcagttatgatgagtaacataaaaaagtagcccaggctgagcgcgttggctcatgtctgtaatcccagcactttgggaggctgaggtgggtggatcacctgaggtcaggagttcgataccagcttggccaacatggtaaaaccctgtctactaaaaatacaaaattagccgggcatggtggcgcacacctgtaatcccagctactcaggaagctgagacaggagaatcacttgaacccagggggcggaggttgtagtgagccgggactgtgccactgcactccagcctgggcaacaagagcgaaactctgtcagaaaaaaaaaaaaaaaaaaaagcccagaggttagagaggagggatctgatctcatcaggagatcaaagaaggcctcctggcgtgtgggtggggaataggaagatcaatgcctgctcaccaggcggccttcctcttaggctcaaggaaatgtggactctcaagacaggatagggcacacctagctctggcatgctcaggggaacaggagcctgggatgcagcactctggcaggaaagcatcaagagctgccctctcggccacctaggagctgtcccctctgtcccctcctcccctaggtgacagctcaggtgtcagggaatgacacttacatgggacgggacctgccctggctcagatgctccataccccacaggagccaatagctcttggggcagcagtccagggacttagcttccagagtcccaggaacggacaagagccactgcacagagagaagtctaaagctatggcctccaaccaggtattcacagtcaatggacagaacttccagcccagatgcaatttgggtttttttgttttgttttttttttgttctgagacgaggtctcgctctcttacccaggctgcgctgtagtggcgtgatctcagttcactgcaacctccacctcccgggttcaagcgattctcctgtgtcagcttcccaagtagctggaattacaggcacatgccaccatgcctggctaatttttgtatttttagtagagatggggtttcgccatgttggccaggctggtcttgaactcctgacctcaagtgatccgcctgtctcagcctcccaaattgctggaattacaggcgtgcaccactgtgcccagcctaggggtcatttttaccccaagcagtattgtctgggaacacagctgacaggccaccttatcagaaggttaatcctttatcctcaagggggaatgagtggaagttaaaatcaggctcaaaaattaaaattagattgggggagtagaagtggtgcctagacagtgagaacagctgcaaaggccccagggtgggtgggggcctggagtgtttgaggaactgaaaggagacctgtgtggctggaggagagtgagcatgggaggaggtgacgggatgaggtcagagacaccctagggacagatcacacaagaccttacaggaataactaaggagctgagacagatcacttgaggctaggagttcgagaccagcctgaccaacatggcaaaaccttgtctctaccaaaaatataaaaattagctgggcgtggtgacacgtgtctatagtcccagttactcaggaggctgaggcaggagaatcacttgaacccgggaggcggaggttgcagtgagccgagattgcaccactgcactccagcctgggtgacagagcaagactccatctcaaaaaaataaatacatataatacagagaaataactaaggaagtgagaatgtatggtgagtgactctaataagcaaggactgaatgcgttctcagctgctgataacattactgcccgctcagtgatactgcttttcctggctgggaagacctgcccttgtcccccagggctcacctttctgtacaccaggccagtgatggccgaccgcaacctcatctgcagcaccttgagcctgtacatgttctgctgctcaaacagcgtttgcaggcaggctgagaggaacatcagcacggcgaggaggtagcccttccaggctggaggcttgggatcaccaataaactccaggaaaaggcttgcaggggaaggagggagaaggtacagctggtgagaggaggtgcctaagggtgttgcctttgcccaaaccagtccagatgtggaggatcagtcggcccaaactagtccaggtgtggaggatcagtcagtgtggttttttttgcaataatggtctccgttatttcccccactgtccatactccttttcaatctgactgcagctcctcaagatcaagaggtggagtttttgttcccacttgttataggctaaattgtgtcctcacaaagtttatatgttgaagccccgacccccagtacctctgaatgtgactgtatttggaaatagggcctttaaagaggcaatgaagttaaaaatgaggtcattaggctgggccctaatccaatctgactggggtccttttaagaagaggaaatgtagacacacaaggagacaccagggggcgcaaacagaagaaagaccatatggggacacagggaggaggtggccaactgcaagccaaggacagaggcctcagatggaaccaccttgcagatactaatctcgaacttccagctttgagaatcatgataaaatacatttctgttgttcaagccactcagtctcagtctgtgatgctttgttatgtcagctgagcagacaccacttgaatctgggctggctacaaaaccggctttggccaacagagtacagtggaggtaaagccatgctggctctgagcctaggcctcaagagaaaatgtggtttttggtctatttcttagaaccctcccaagcacccacatgaacaagtctgagctagccttttggaggatggggacccacatggagcagagacagccatcccagtctcagatacacaactgcaggcacatgagaaaacccagccaagaaaagaaccaccacccagctgagcccagcccacattactgacccacattaccatgaactaaataaaagaatgtttgtcattttaagccactcacttttggggcattttacagcaaaaactaattgatgcagtcaggtaagagcttgcttatttgcccttctgggggtcagtcactttctcattaatccatttcccttcctcagtgtccttctcacccaccatccagtgtcccgagcaccagatgtataggcagaggcaggagagctgaagccccctggccctggaaggatgccactaagagaccacccaccttagcagggcacttgaggtctgggactcacctgagcagcttggggacagtgaacctgaagacatcactgatgatgaggctgagggtccccaggaggaaggtagaatggaacacctgccagatggccttcagcagtgggcgccactggctcccttcttgccgtaggaagggctcggtctctggagccttcatgccactgccgcctttccttttaaatgctattgccttgttgtgcctgaggggaagggagagattagctctgggtcccattttatactctcagccgccagcggcagggccaggcattaaagggttgttttcccaacagtggagatgggtgggtgtggatctagcctggctccctcacctgttcctccttatcaccctgagtacccacttaagaggcaatcatgggagttggggggcagggcaggagggcactctgaggcctcttagatggccatgggaaagcacacctgttgagcacctactatgtgccaggcactccccagtcatcctaagaccccctgagaagccaggtgttgttcccatttcacagatgagaaaactggggctcagagaagcgaacttgcccaagggcacacagctgagaagtaaaagaactggaatttgattccagctctctgcctccagagcccatgcacttttcttttttcttttcctttttttttttttgagacgaagtcttgctctgtcgcccaggctggagtgcagtggtgtgatctcagctcacggcaacctccacttcccagttcaagtgattgtcccacctcagcctctcgagtagctgggattacaggcaagtgccaccatacccagctaatttttgtattttcagtagagaaggggttatgccatgttggccaggttggttttgaactcctgacctgaggtgatctgctcgccttggcctcccaaagtgctgggattacagatgtgagccaccacacctggcctctcatgtacttttcaacctatcgtgttgtcaacctggaggaagaacagcaccccgtccccaacacacacaatcatccagcccttaggtggttttgaactggtggagaatcacggctgatgggcatggggcctggtgctctagctctgggtgaaagtgcagacagaagctcaggctgcctcaaactaataagatccccagcctttggctataaccaggggccacagagaagagctaaggtgagggagggagaggaggagatgggggaggcccgagggcccctgtgaggcaggtcagaagccctgggccagaaaggagaggctggggcgatgcagctgctgacagtccggttgctgtgtggtcctgggcggggacactgctcctctctctgtgtgtgagaggatgggtgtggtcccctgctgagtcccctgtggctctgacaacctataaggttatcagtaatttctttttctttttcttttcttttttttttttttttgagacagagtttcgctcttgtcgcccaggctggagtgcagtgtagcaatctcggctcaccgcaacctctgcctcctgggttcaagcaattctcctgcctcagcctcccaagtagctgggattacaggcacacaccaccatgcctggctaatttttgtatttttggtagagacagggtttcacaacgttagccaggctggtcttaaactcctgacctcaggtgatccacctgcctcggcctcccaaagtgctgggattacaggtgtgagccaccatgcccggccacttatcagtaatttcaatccccattacagatctgtgacccggggccacgtgctgggatcagctctttacacgaaggagctcactgactcccctggatccccttgccaggtgagcattattaggttttccattttacagaaggggaagctgaggctctgagagatggcgacagccgcccgaggtcacacagcaagggcagagcagggatttgagcctagatcttgatttatggtttgtaaagggtttcttgtgcactaaggacccccaacctcaccataataaaataataataaaaaaagaagcataagaaaaacctctggtgagctcaggtggccagacccttcaaggccaaggtctctgtcccacattattggtctgatctggtgtttggtttggcatctatggagggttgtggttcagctctgttactgagtgggtgtggcctgctgctcacaaatattttggcatttggatctcaaagccaagaagatgccccttccatacagagagcatccctgcccaccctttcctgtttgatcctgccatttaattcattgccttcacagccatgtccatggctccaaccctctctttgtctcgttagaaccccaggtgggtagactttgcctgtgttttccaccaagatgtccctagtatagagtccagctcctgcacacagtaggagctcaataaacacttgtcaaatgaatgggaaaaacagattgagtgatgtgtgcaaagggcctaataagagtgccccctgcacatactgttataaaaatttatagaaggaaggaaggagcttggctgggtggacagaacttggctttggagccaggagactgtggttccaatgcctgctctgtctcctctcctctgagccttagtgtttccatctgcaaaatggggtcggggaagagttcactggaaagttttctttctggctgaggttctgctcagttctatttgagctgtttaacccagagagtcagtgtgttcagcctgcaggctccatagcaagtgttttcctctcctgcaggtctcacctcccatcaaggaagatgtccagattgctgtctgacgtctggtctctggactgaaggccatttagtgcagatctcacaaatgatggtggggcaaggcagggggtatgcatgagtggcatgggcaaggtgtgagttgggggatacaaaagggagtggtggaggccgggcacggtggctcacacctgtaatcccagcactttgggaggccaatgcgggcgaatcacctgaggtcaggagttcagggccagtctgatagcctgagcaacatggagaaaccccgcctctaataaaaaatacaaaaattagtgaagccgactggaccagcaggtggctgttgtgtggcctctcaggaggacgccctctcccttcccccagtggttgcaaaatacttcagaaagaaaaccaaagttctctgtgggtgcagtcggttgtttcagaagctgacggagcctggtctttgtataaccccatctttcccctttctttctgtcaactgtttatgggaggattctcaaactgttctggagaatgtttctaccctttagttctagtgttgggtgacctgtaattttcatgttggctggggatgccaggagttggcagaggctccttccagagcccctgtggactggattctgccacttccgtaaaatcattcaaaagtagagggtgagtcaggtgcagtagctcacatctgtaatcccagcaccttgagaggccaaggcaggcagatcccctgaggtcaggagttcaagatcaccctggccaacatggtgagaccctgtctctactaaaaaaaatttaaaaatcagctagatgtggtggcacacgcctgtggtcccagctactcagaaggctgaggcaggagaattgcttgaacccaggaggtggaggttgcagtgagctgagatcataccacaacccagtgaagggggtccagcaagccatgcctggggtgagagagaactgatgttttggttctctcacactacttattctgtttggaaaaacacatgcccttcctttgtgggaacagcccctacccacttctgtggctctgaagggaccaccagtcatggcaccagccccctgggcatgggattggcccctgacaggcacatgacttgagccaggccaattagaggccttccttgggatttactatatggacgttaggagagagatgctctcttattctgctggagtttgctgaacttgcatgggaagggataggccttatggagagaccaacacatagataatagttgggatgggagatgaaaggagagaatcctgacatcatttgagtcccctgatccagcaacacctgaggctagatcctcttagctgtgtgagcctatagtatcagtctctgtctcctctgtctctcttaatgtgtgggattcagccatctgcaacaactaccacaaaatcccggagtatgcagggaacttcccacagagctaacttccttttttgttctgtctcctaaaacaccaagatccggtgaggttaagcaacgtgtccaaggtcatcactatttgaaggcagggcagcatttaacccaattttatctaatcctatgcaggctcatttatctagaccagagtttctcaaatgaggcatcccaggctctaagggctgcagagaagtttccagagatgccactgagggcaggagtggacagagtggataactccaaagatcttaacaccctctggatgactaacagtgcttgagcacttcccatttgcaagacatttgcaagttcttttccataaatcatccttttttttcatccccataagctatgagctggggctaatgacatccccactgaacagatgagaaaactgaggcccaggaaaggaattgctcaggttatatagtaagtgagcagctgcttgtgtgttgagtcacctcccaaccctccaccccggccttaaaatacctcttctgtttgctgcctgtcattctgccatttccccatttgtaggaacctgtttgttccccgtttgtaggaacctgtgatgcgttctgggaggaaccatatcttaagcctgatactacttagtgggatcagctggaaggcaaggtggggaggcggcagtgccgccagagtagcgttgggggctggactgggggtcaaatgatgaggtttttttgtttttgtttttgtttttgtcttgtttgtttgtttttttttttgatacggagtctggccctgtcactcaggctggagtgcaatggtgacatctccactcactgcaacctctgcctcctgggttcaaacgattctcctgcctcaagcctcctgagtagctgggattataggtgcctaccaccacgcccagctaatttttctatttttagcagagatggggtttcactatgttggccagattggtcttgaactcctgaccttgtgatccgcctgcctcggcctcccaaaatgccgggattacagtcgtgagccaccgcacccggccaatgatgagcttttctgaagtagcatcaggtgagttcttgacctccacccacttacctccgggctgcactgcggttcctcatccactccttttcaagccgggaaacaagttcttctgaggagttttctctcccaagcgaccagaggtcttttggtctcagtggcctcctgtatcccctccagaccaggctgcaaaagaggggcaccagggaaagcttttcctgccattcacccctgcaggatcctggccaggcgagtagctgtgtgaccctgggtaagtcactttacctctctgtacctctactggcccctgggtaaaaagaaagcaattcactaaccccacctaatgtctgcagggcatttctcgtttcacaaagattgtctcattaattcttacatgaacccataaggtaggttattattgtttgtttgagatggagtcttgttctgtctcccaggctggagtgcagtggtgcaatctcggctcactgcaacctccacctcccaggttcaagcgattctcccacctcagcctcctgagtagctgggattacaggcacccaccaccatacccggctaatttttgtattttttgtagagatggagtttcaccatgttggccagactggtctcgaactcctgacctcaggtgatccacctgcctcagcctcccaaagtgctgggattacaggcatgagccaccacacccagcctgtaaattgatagtttataattgtataaatgtatgagtatattattatagatctattttacagatggggaaggaaatagaagtgcagagagattcagtggctaaaccaagggatagcccttggcaagggaaacagacatttccctgggaatcagaagtccgttgaccaaaactatcattgtagaagaagcttgaactcctccctcagctttttttttttaattattattattttttttgagatggagtctcactctgttgcctaggctggagtgcactgatgtgatctgggctcactgcaacctccgcctccctggctcaagcgattctcacgcctcagccttctgagtagttgaaattacaagccaccatcacacctggctaatttttgtgtttttggatggtgtatcaccatgctggccaggctggtctcgacctactggcctcaagcaatcctcccacctcagcctcccaaagtgctaggactacaggcgtaagccaccacacctggctaatttttttgtttatagtagagatgggatttcgccatgttggccaggctggtctcgaactcccggcctcaagtgatctgtcagggttggccttccaaagtgttgggattatgggtgtgagccactgtgcctggcctcaggtctctttaatctttctgatgacaccagccagaaggtcttgcctggttctggtctctgactcttctctaagccttaccaagttcccttttcttttttatttttattctttttatttttttgagatggaatctcactctgttgctcaggctggagtgcactggtgtgatctcggctcaccgcaacctccacctcctgggttcaagtgattctcctgcctcagcctcctgagtgactgggattgcaggctcccaccaccacacctggctaatttttatatttttagtagagatggggtttcaccatgttggtcaggctggtctcgaaatcctgacctcaggtgatccacctgcctcagcctcccaaggtgttgggattataggcgtgagccactgcgccaggccaccaagttcccttttctaatgcagagccaacttggggaagcaaccgttctgacatagaaattattaacgtggcttgattttccctgaaattatttttggagttctcctatatggcaagtgatgctatagatttttcctattttagcagtgatagagagtttctttttaaaaacagtttattcgagtaaaaaaagtgactcaatttagtttttgccccagtaggacaaaaaagcatcaagagtggtccataaatgcttaagtttgggaagcaggggctggaccccccagtagagctgtttcgaaaacctctaagctctttctaccagttccacacattcaaagcctgatatttttcatttatttaatagccatttaggccgggtgcggtggcttatgcctgtaatcccagcactttgggaggtcgagtggggtagatcacttgaggtcaggagtttgagaccagcttggccaacgtggtgaaacccggtctctacaaaaaactacaaaaattagctgggcatgatggcaggcgcctgtaatcccagctgctcgggaggctgaggcaggagaattgcttgaacctgggaggtggaggttgcagtgagctgagattgtgccattgcactgcagcctgggcaacaagagtgaaactctgtctcaaaaaaaaaaagagaaaatgaatagcccaggcacagtgggtcacacctgtaatcccagcactttgggaagccgaggcgggcagatcacctgaggtcgggagtttcagatcagcctgaccaacatggagaaacactgtctctactaaaaatacaaaattagccgagcatagtggtgcatgcctgtaatctcagctactcgggaggctgaggcaggagaatcgcttgaacccaggaggcggaggttgcagtgagccaagatagtgccattgtactccagcctgggcaacaagaacggaactccatctcaaaagaaaaaaaaataattaccacttaaactcattatttgccaggccctgttctaagtgctttacagatctcatcttatttaagcttcacaaccctatgagctaagtgctactatcaatcccattttgaaggagtggagactgaggcacagagaggttaagtaactgtccaaagcaacacagctaggaagtggtagggccaggattcaaatccatatgtcaggtgctactgaggtctgaatgccgtgtggttaggagagagcacatcctcaagtgccttgtgagctggccctggagaagcagctgttttctcaatctgcctggaaccctctagaaagtagacacttgctcctttatctcctcacccctggggcttagcacatagtaggtgcctattaaatgttggtggaatgactgaaatcaagtattggagacaattctaattactattaagcacccgctgtgtgcaagcactaagcactttccgtctcatgcaggttgagtcatccccattttacagagggaaaactgagactccggaggtttgcgacatggcctgctaacaggcagagccgggattcaaatcaagatctcactccagtgagtgaatgggaacaggatgcagatggtagacactgaacacgaagaagaaagcactgaggctgggatggagaaagacttgctggcctttgtaagcacaggggaagggccatggctgggaatcagagcagcaaatgcaggcgggtgaggcaccaccccaacccttccgtgcgactttacttacccagaaacccaccagaacgtggctttggaggggaaggctgccccagtctctggacaggggttctgcaacagacaaaaatggagaagggaagtatgtggcaagggtaggaagacaggacgaactgtgtatttttttttttttcgagacaggttttcgctctgttgcccaggccagagtacagcggtgtgatcttggctcactactacctctgcctcctgggttcaagcgattctcctgcctcagccttccaaagagctgggatgacaggtgtgcgccaccacacacagctaattttttgtgtttttagtagagacagggtttcaccatgttggccaggctggtctcaaactcctaacctcaagtgatctgcctatctcggcctcccaaagtgctgggattacaggcatgagccactacacccagccctgacggtgtatttagtactgaaagtaaacatcgaggtgccctgtctccttgccaggggtgtagaccagtgagcttggtgcttcccagcaggcagcgtaaaaagaggttgggccacaggcctgacaatgtccacaaggtaagaaataacagtggctcagaagaacaactatgattatactgaaaccaaaaccttgctttgcttctcaaaaggaaggacactgcataacgaagaaattagatccttgacaatatccctcggcaaatgttgtgaagacagacctgtcgtgcgatttttgtcaggtgctccaggaagattacaacagtctgtactctttaccaataaggcgtgaaggtgcccatttcaccacgtttttgccatcacagcttattaatttttaaattttgttgctactctggtaggtacaaaaaagattcctatgatagttttaactattctcaagccttcgagcaatttttttttttttttttttttgaatacagggtctcgctctgtcacccaggctggagtgcaatggtgcaatcatagctcactgcagcctttatctcttggattcaagcaatcctcctgctttagtctccacagagctactctgtagtgggactacaggcatgcaccaccacactaggctatttttaaaaacctttttgtagagatggggtctcactacattgcctagtctgatctagaacacctgggcacaaacaatcctccttcctcggtctcccaaagtgttgagattacaggcatgatccactgcatctggccccatttgaacatctgtttatatgatgtcagatcagtctcttccacaaaagaattgtttcttgatttcacagactgcttcactgttacctattgtaaatctctcaatctctcatgagcttcttctatggagcacttaccccaagggtaattttctttttccttcttttttttttttttttttttggtggagttccgctcttgttgcccaggctggagtgcaaatgcacagtcttggctccctgcaacctccacatcccggattcaagcaattctcctgcctcagcctcccgagtagctgggattacaggcgtgcaccaccatgcctggctaatttttgtaattttagaagagatgaggctttaccatgttggccaggctggctttgaactctcgacctcaagtgatccacctgccttggcctcccaaagtgttgggattacaggcatgagccactgtgaccatccaattttcaacatatttgtttaattttgtgaccagtgtctggttcccctgcttgaccagtagctacgtgagaacagaaactctatctgcttgttcaccatagatccttatgcccttgctagggcatagcggggtttggcaaactatgaccaaatctggcccactgcctgtttctgcaaatagtgttattgcaacacagccatgcaatttgttgacatattctgcttttgcgttcaatggcagagttgagtaattgccactgagatcactgtatggctcacagagtccaaaatattttctcttggcccatatagaaaaagtctgccaactgtggcatcgagtagaaatgtggtacactttttgctgaatggctaaatgaataaaaaaattaaagacttttggtcacctgggggagactgagacctcaaagtggaacaggaatgaggttggaacttggtgacttacagactgctgggggtcttcagggaagaaggggggttgatccgccaggcaggacagcacaaactgtgccaccaccagagacaggcataggtaggtggacaggtggcggacagggtcgctctggaagccctgtgggagggaaagcagaagataaggaatggagacagaggagggtgctcagaggagagaaaaggtttctgatcttgggtcagtgcccactctggggaccagggcaagagtatttgaaagccagagccctggctttcctagtggttctaattttctttctttcttttttttttaagacaaagtctcacttggtcgcccaggctgaagtgcagtggcatgatctcggctccctgcaacctctgcctcctgggttcaagtgattctcctgcttctgcctccttagtagttgggattacaggtgcccaccaccatgcctggctaacttttttaaaatatttttagtagagatggggttttgccatgttggctaggctgacctcaaactgctgacctaaagtgatctgcctgccttggcctcccaaagtgttgggattacaggcatgagccaccatgcccagcaggtcctaattttcaaatacccaatttataatattctgtctatacaaatggtgggccagggctgcgtctgggttttgtccttagccacatgatgattggccacagctgctgggacaatgagatgaagaaacaatttaccttcttctttgtgccacaaaagaaatcctttctccgttccaccctctaccccaatcttcaaccctgctcccccttggccagggttctctggtttgcagagatgagagctggttttattgagcactgaccctgccctgagcacatgcggcattcttgccatacacagtctcatcagctggagtttacttgcttcctttgactcagggggaaaccaaggctcagagaagtgacagcaccttgttcaaggacacgcagatgatctggtccaaattgtgatgctcctgctgccacaccacaatgatttttgcatctgctgccctgtcatctggtcagaaacaccctaattttctttctttttttaatttaaagcattttttattttttaattttaggtgtgtgtgtgtgtgtgtgtgtgtgtgtgtgtgtgtatactttttttttttttgagacggagtcttgctttgtcacccaggctgatgtgcagtggcatgatcttggctcactgcaccctccgcctcctgggttcaagcgattctcctgccttagcctcctgagtagctgggattacaggcatgtgccacgacccctggctaatttttgtatttttagtagagatggagttttaccatgtaggccaggctggtcttgaactcctgacctcaggtgatccgcctgccttggcctcccaaagtgctgggattacaggcatgagccaccgcgcccggcctgatatatatatttctggatgacgtgagatattttgatacaggcatgcaatgcataataatcacatcaaggtaaatgaggtctccatccccgcaatcatttatcctttctgttacaaatgatccattctactcttgtagttattttattttttagtttattattgagttggagtctcactctgttgcccaggctggagtgcagtggcttgattttggctcactgcaacctccgtctcctggattcaagtgattctcctgccttagcctcctgagtatctgagattacagatgtgtgccagcacgcctggctactttttttgtatttttagtagagacagggtttcaccatgttgcccatgctggtcttgaactcctgacctcagatgatcctcctgccttggcctcccaaagtgctggaattacaggtgtgagccactgtgtccagcctcttttagttattttaaaatgtacaattaaattattattgactatagtcaccctgttgtgctatcaaatagatattattctttctgtttttttgtacccattaaccatccccatttcccccacccactgtccttcctagcctctagtaaccttccatctactctatatgttcatgagttacattgttttaatttttagctttcacaaataagtgagaatatgtaaagtttgtctttctgtgcctggcttatttcacttaacatccatgttgttgaaaatgacagtacctcattcttttttatggctgcatagtacttcattgtgtatatataccacattttctttatcagttcgtctgttgatggacacttaggttgcttccaaatcttgtttattgtgaacagtgctgtaataatcatgggagtgcagagatctcttccatgtactgattttctttcttcctaagttttttgcttgtgttcgggcgtgtgatttgtgcagaactgactctactccgaggctgggtgggtgaatgaggcctggccaacgaatacgttctggtcttttggctaccatggcagggttaggaatgcacatagcaccccatgctgggtacttgagagctggaaccatcgggagattctgctggctttgctacatgctagaatgtaagtgtgaaggtattggtggctcttcttgccactccattggagaatcaagctaacatggcagagccaagaggcagaagtggagatctggtgatggtacctggtcccaggcctggatcagtcatgcctgggagatcccatgggtatgagctaataaatgcatgagctaatgaacccccttgacttacccttttcattaagctagtgtgaactgaggttttatggctttaaaccagagccctagttttaaatcatgattcctctactggattttatactcttctagttttgggtttttgtttgtttgtttgttttttggcagatagcagacaattggatattccaatgacaatatggcccatcttccctaaactcccactgttttccccactgtttctctcagaaagtttgttctgaatttgcctgagatgaactcgggctctgcactcccaagctttgtggccctgaggccgtcattcccttctcctagccttagtctccctcatctttaaaatgggacggctagaattcatcattggctggggcacattggctcaagcctgtaatcccagcactttgggaggcttaggtggaaagatcgcttgagcccaggagtttgagaccagccttgggaacataatgagactttgtttctatttctatttaaaaaaataaagaacccatcactgtgaactcttgtgagaatccagtgaggagacgtgtgtaagtgcctgccacagtgcctggcacatggttggaaccccagaatgtatatggtcccagtattattgtttctatgctgtgtcccaaaaagctgacttatgtcaactgtgggagcccaccatttcagaaattactgaataacctgtggaatttccccttagttacaaaggttactcttttaaaaactctgtcctcggtcaggcgctgtggctcacgcctgtaatcccagcactttgggaggccgaggcgggtgagtcacttgaggtcaggcatttgagatgagcctggccaacatattgaaaccttgtctctactaaaaatacaaaaattagctgggcatggtggcacatgcctgtaatcccagctacttgggaggctgaggtatgggaatcgattgaacccggaggtggaggttgtagtgagccaagatcgtgccactgcactccagcctgggcaatagagcaagactctgtctcagaatgaacaaacaaaaaataaaaactctgtccttaaggacagggtgatgcttctctaccttctcctttaggggcaggatggagtaaccactggactgaagaaatgatctgtgagtccagacgtggtggctcatgcctctaatcccagcattttaggaggctgaggtcagagaattgctcgagccgaggagttcaagatcagcctgggcaacaaagcatgatgttgtctccacaaaaataaaataatgaagtaaaatatctgaaacctgctgcagcctgttcattggtgttaagataactccctctcccagaagccttggctaagcacactgttgaggccagtgcttctcaataggtgggtgactttgtcctcctcacccccagggacacttggtaatatctggagacattttgggttactgcaattggatggtatgctactggcacctatgggcagaagccagggatgctgtttcacaccctgcagcaaacaagacagccctgtccacccaacaaagaattgtctggccacaacattactaaagctgaggctgagggaagttggtctaggctacatgtttttctctttacagagaaaatgacccatcatgtctcctaatagagaaacgctgcttccggccgaatgacaagagctcacgcctgtaatcccgacactttgggaggccaaggcaggtggatcacttgaggtcaggagctcgagaccagcctggccaacatggtgaaacctcgtctctactaaaaatacaaaaatttttagtagaaatttagtagaaatttttagtagaaatttagtagaaatttagaataagccaggtgtagtggcacacacctgtaatcccagctacacaggaagcagaggcaggagaagtgcttgaacccgagaggcagaaattgcagtgagctgagatcatgccacttcattccagtctgggcgacagagcaagcctctcaaaaaaaaaaaaaaaaaaaaaaaaaaaaaagctgcttcccagattgggcaacagaaatacgagtggtgtgcagaatgagtgtgtaaatataggtgcataggaacatggggagggtgaatccatgacatgaggggaggtgtgcacggaggggtatgtgtgcacacaggtgtgtctgtgcccaggttgtgtgtgtgtgcgtgcatgcatgtacttgtgcgatgtatgaatcagtgcctataagtgtgtgcatcgtgtgcaagtggcacgtgtgatgtgggcctgtaagacaggaaattgtgttgataagaaatgtatgggatgatgggtactgacaggtgcgggagtggattttgtgtctctagagtgtaagtgactggcttgtgtgtgtcactgtatagagaataagttgtatgtggaaacaggaggagaaaggaagggacccaaggcatgagccaccattttggtttcccagggtggcccacgccccgacttaccgctccggaggcctgctgggcagcgttggtagctggcaagacaaagcagagaagccagtaaccaaacagcactccagatgactggactccctttttcctctcggtgtgaatcaggaacactgcgaagctctggacgggaaagtcagggaggccccttaggggagggtgggaggctgaggggagcctcttctcttccccttgttctccactgtggcaggcaaagcagcagctgggaggaagccgggctccagactgaaggcatcattaccatcgtggtgagccacacagtaggatgaatgaggaattctggggcctcaggcgttccctgttggattttccaaagagcgacagccacgctggaggtacacaggactatgagggcgaatccaagcacctgaggatacaggcttagataagcttggggggcaataagagaggtcacagcaaactggtaggcggccccatgtccaactgggagctggttctgcaacatcctggctgatactgagtataccagggtcaccagctagcaacgtgccaatgtgaacaatgtgtaaagggcattgcagatcactcctgacctgtaactgtcatataaataatgcacaggaagggcttgagccaaccgagtgttttccaaaatgcaggaagtgctccaatcgtgcacatatgagatgactttgggtatggagaaacagcaggaaatgaaatgtactcaccaggtaaaaaactatcctttctccaagtcatttttcaatccctgctatgaaatcaaggagcaactctctgttgggccagtaagtctctagggtctctctaatatattttggtttctctattgaataaaagaaaggaagaaaatgagagaacgtgggcacaccagagggaaggccagagctaggttacgttggaggaactgctcaaagaacctcagtttaaagcagaagttggcaaactatcaatcatcaaagaaaaacaaaaagcatatgtcatgacaggtgaaaattacatgaaatccaaatttcagtgactacaaataaagttttattgaaacgcagtcggccgggggtggtggcttacacctgtaatcccagcactttggcaggccaaggcaggcagatcacctgaggtcaggagttggagaccagcctggccaacatggcgaaaccctgtttctactaaaaatacaaaaaaatagcgaggtgtgggggtgggcacctgtaatcccagctactcgggaagctgaggcaggagaatcacttgaacccaggaggcggaggttgcagtgagccgagatcgcaccattgcactccagcctgggtaacaagagcaaaactgcatctcaaaaaaaaaaaacaaacaaaaaagtaacacagtcatgactattgtctatggttatgactattgcgttcattctggaatggcagagttcagtgttcggaaggaagattacctggctcacaaagtctcaaatactgtgtaccgcttggctctttaagtttgccaacccctgggttggtggcgggtgataatgtaaaaattaatacaatggcagaagaatgaatgaactctgaagaacattctttggaagcctacaagaatggagtagaagaggatggatgagcagaaaggctcacacttggaatgccagtgtttatttaacacactaaggtaaatacatatcacatataaaaattgtcctataatacagccagtgggggaacataaaaataaatgcataactttttaaaaggttcatcctaatgtggctctaaaattaccttgtgtatccaagagtctacatggtatgttttggaaaatgccaggttatggtagctataaactgtccaggaacatgggagtgtatgcgtatgtttgcgcatgcgtggattttcggaattacaaaatctgtttgggagaaccgtgttccactgagttgacctctgtagcctttctaatattgctctgtttgattaacagattcccttctacaccccgataggaggagtctactttaagacttcaccaggttccagcctgtcccctgcctcccccgaacattgcctggttccaggctcccagggatggcagctaccatcttggctttgaagagtggggacatccacaggtagccccggccatggtggtggatgaagaggaggtagatgggaccaaggacccagaggtacatggggggtacccagacccctgctgttctcaggaagcacaggctcagcaggctggtggcggcaggttcaggctctgtctggttccagacctgagggaacacaaagaggacccttaggatggtacaaggcaggggtccccagctcacctgcccagggggccaggcaactttttggatctttaacatttacacaaaaatgtaccaagtactctttggaatacctactaattctcaattcctttcatcctgacattaaccctaggtagttgcaattatattgatttgcagatgaagaagctgaggaccagagaggttgagtaactttgctgactttacccagctgaggagtggaagggctgggatttgaacccagggaactgggccatgtggtctaggagacctgggctccataatcattgctaggcatggactgtcagttaatccttataacaactccaggacgcagacagtactgtctccatttcagaaaccagcagactgaggcaccagtcggggaactgcctcccccagggacacacaaatgggaagtggcaaagctgactctgacccaggcttatctgaccccaaacctcgttcgactggtggtcttgatgtatgatttgtttttattttttattattaattaatttatgttttagagacagggtctcactctgttgcccaggctgaagtggcacaatcaaagctcaacaaagcttcgaatttcctgggctcaagcaatcctcccacctcggcctcccagagtgctgggattacaggcataagcagcctcaccaggcctggctaattttttttttttatgttttgtagagatgggggtctctctatgctggtctcgaactcctggtctcaagcaatcctcctgcctcagcctcctaggtactgggattacaggcaagagccaccggcccagcttgatctgttattttcatctcagcaggtctgctggtcctatctaaccctagaagaaatttgaagtttagtggacgtggcctcttcaattctctctccgctgtctttttactcctcctggtttcacaactcaccggctgtgcaaactttaacctctctgtatctcagtttccttccctgtaaaagggggaaaacgagactctacctctatgagttgtattaaatggattaatagcagcaaagttcatagcagcatggcacaaggttgggcacaaggctaggcacagagaaagccctcagttcattgccagtttattgcttcaactccctggccctcgaaatgctggcagtttgcaacccccacccccactccatgaactccactccctggagtcctttgctaagagcaatggaaaaagaaaccagagaggtaagggctctccgggggtaggagggcttgggggacccactagctttatgcaaagaagagtcaaagcccctagtagctgggaggtctggtggccccttaaatagagctgggctctcggctgctggcttggtgaaagaaatccaacccgctgcagtgagggggccggagtaagtctcctcgcttcccgggtccaggaatttgggggtctctcctctccccagtatcgcagcccgagagatctgcagccaaaccaagcctggaaaaggagagtggggcgcgatggggggcactcaccccctgccccgcgcagggctcagcaggcgcggccatcggcgccttctgtcgtcgtgggtcccagcgtctgtctgtcgctaagtctctgggcagactgctcggccgcgatcctgccggagaagaggcggggctgggctggtcgggctgggctggtccggctgggattcgagctccgggatcgggaggccccgggcaaggtccagctgcgcggcgggagtgaggccacgggaggtgaaaacaggcgaggtgggggatgggggaagagaggcgctcggggagctgggacgggcaccgggttggggggtcccggaacccctgaaagttcagtgacacctccatagttccctcttccccctgcaacaagaatcactccagacttcctaaacactttggacccagcaatttccaggagttcatcctgatgagagaactgaaaggtgtgcacacgttagtaacaaggaggcctggtgaccgcctaagcgtccaatcgcggggaccaccgggtcgaggccgagaggatggagaccgcgtcacaggcacctcgctgctggaatggagggtggtggggagaacttagaagattatgcaatgggctggcagggctatacccagccgccctggtaagcagaaactcaagaaacctctagggtcctgttttctggtcgtatgatcccaggagtgcacatgggcccctcgggtgtctgaacagaagggcataggagggagggccgcagccctgcagtcttactctgctggtgtagcggtcacctgccaactcccaccccaccctgcaccgcgggctcctgagtcggcagattaagcattttataaattctattttaaatacgtgttttaaacttgtcagatatttgtcttcatttcagtccctgcgcctctacctcttgctgtggtcgcttatttaacactggggggctacgttctgctaagtcccagggagagactgttcctaatatccgagggagatattattcctaatatcacgctgggtgaacaccacgtgtgtacagcctctgatacgattggtaatatccaagggagatattatcctaacatcccagtgggtgaacaccatgtgtgtaaacgctgtggtattattagaaatatccaagggagatattactcctaatatcacagtgggtgtacatcctgtgatattattcgtaatatctgaaggagattttactcctaatatcacagtgggagtacacactgtgatattatttgtaatatccgagggagattttactcctaatatcacagtaggtgtacaacctgtgatattattcataatatgctagagatatattactccaaatctcatggtgggtgtacactctgtcatagaattcgtgatatcctagggagttattaccgctaatatcacagtgagagtacaccctgtgatattattcatactatcctagaaagatattacttttaatatcacagagggtgtacaccctgtgatattattcataatattctatgaagatataactcctgatataaccgtaggtgtataccctgtgatattatttgttatatcctagggagatactacacctaataccacagtgggtgtacaccctgtgatatgatttgtaatatcctagggagatataactcctaatatcacagagggagtacaccctgtaatattattcataatatcctagaaagataatactttcaatatcacagtgggtgtacactctgtgataatattcgtaatttcctagggagatactactcctaatatcaccttgagtgtacactgcgtgatattattcgtaatatcgtagggagctattgcttttaatttcacagtgggtgtataccctatgatattattcataatatcttaagaaggtagtactcctaaaatcacagtgcctgtacacactgtgatattattcataatattctagggagatgttactcctaatctcatagtgggtgtacaccttgtgatactatttgtaatgttctagaaagatattccttttaatatcacagtgggtgtacaccctgtgatatgattcgaaatattctagggcgatattactcctaatatcccagtgaatttacaccatgcgtgtacacgctgtgacctcccagaaagatatgactcctaatatcacagtgggggtacaccctgtgctattatttgtaataccctatggatatcataatatcacaatgaacgtacaccattgtgtacatgctgtgatattatttgtaatatttttgggtgatattacccctaatgtcacagtgcgtgtacatcttttgatattatttgtaatattctgtggagatattgcccctaatatcacagtgggtgtatactctttgatactattcgtaacatcctggaagatattatccatattgtcacggtgggtgtacaccctgtgatattattcgttatattctggggatatactattacccctaatatactgtgggtgtaccccctgtgatattattcactatatcttggagatataatattacccctaatatcacagtgggtgtatactttgtgatattattcattatatcctgaagagatattatttcctttaatatcacagtgcatgtacaccttgtgatattatttgttatatcctggggagatactactatattactcctagtatcacagtggctgtacgccttgtgatactattcattatatcctggggagatattattactcctaatatcacagtaagtgtataccctgtgatattattcataatatcctgggagatattacccatattgtcacagtgggtgtacatcctgtaatattatttgtaatatcctggggagatattattactcctaatagcacagtgggtgtacaccctgtgatattattggttatatcctggggaggtattattattcctaatatcacagtgggtgaacattctgtaatattattcattatattttggggagatattaattcctctaatatcacagtgggtgtacaccctgtgatattattcattatatcctgggaagatattaatccctctaatatcacagtgggtgtacaccctgtaatattattcattatatcctgggaagatattatttcctctaatatcacagtgggtgtacaccctgtgatattatttgttgtatcctggggagatattattatgtctcatatcacaatgggtgaacaccctgtgatagtattcgttatatttggggaagatgttattacccctaatatcacagtggtgtacactctgtgatattattcattatgtagtggggagatagtattacccataatatcacagtggatgtacaccctgtcatattatttgttatatccttgagaaatattattattcctcttatcacagtgggtgtacaccctgtgatattattcgttacatcctagggagatattgttacccataatatcacagtggatgtacaccctgtcatattattcgttatatccttgagagatgttactacccctaatatcacagtgggtgtataccctgtgatattattcatcaaattttctggagatattattacccataatatcacagtgtgtgtacccactgtgacagtattgattatatcttggggcgatattactcttaatttcacagtggctgtatccctgtgtttacaccctgtgatgttattcataatattttagggagatattactcctaatatcacagtcagtgtataccatgtttgtacaccctatgatattatttgtaatattttagggagatattactcctaatatcgttgtgggtgtacagcatgtttgtaaacactgtgatattattcataatatctgagagagatattactgccaatatcacagtgggtgtacaccctgtacaccgtgtgatacgattcataatatccgagggagatattactcccagtatcacagtgggtttacaccctgtggtattattcataatattcgagggagatattactctcaatatcacagtggatgtacaccctgtgatattatttgcaatatccgagggaaacattactgctaatatcacagtgggagtacaccctgtgatattatttgttttatcctggagacatattattcctattatcacagtggttgtacaccctgtgatattcttcgctatattcatggaagatgttattacccctaatatcacagttggtgtacaccctgtgatattattcgttatatcctggggagatattgttacccctagtatcacagtgggtgtacgccctgtcatattatccattacatcatgggaagatattattacatctaatatcactgtgggtgtacaccctgtgatattatttattatatcctggtgagatgttattactgctaatatcacagggtgtgtcaaattttctggagatattattacccttaatatcacagtgggtgtgcaccctgtgtgtacactctgtaatattatttgtaatattttagggagatattactactaatatcacagtgggtgtacaccctgaggagatattacttcctctgatatcacagtgggtgtacaccctctcatattattcgttatgtgctaagtagatattattacccctaatatcacagtgggtgtacaccctgtgatgttattccttatatcccaagaagatattattataactaatatcacagtgggtgtacaccctatgatattatctgttatatactggggggatattatttgtaatattttagggagatactactcctaatatcatagtgggtgtactcatattttacagatatattacttttaatatcacagtgggtgtacaccctgtgtgtacaccctgtaatattattagtaatattttagggagatattactcctaatatcatagtgggtgtacaccatgtttgtaaaccctaggatattattcataatatccgagggagatattactcccaatatcacggtgggtttacaccctatgatattatttgtaatatctgaggcaggtattactctccatatcacagtgagtgtacaccctcctatattattcataacatccgagggagatattacttccaatatcaaagtgggtgtgataatatctgagggagatattattcctaatatccgtgggagatattattcctaatatctcagtggttgtaccgcgtcacagtgggtgtgcactgtgtgatattattcatagtatccaagggagattttactcctgatatcacagtgagtgtacaccctgtgatattattctaatacccaagggagagctttctcctaatatcacagtgggtgtacactctgtgatatttttcataatatccgagggagataggatggagaccacgtcacagtcccctcactgctggaatggacactgtctacccgtggagtggtggggagaacttagtgagattatgcaagcgtttagcacactgccagatatacattaaatgctcagaagacttagcttttattattactgtcataattgaggccatgggttactaaccagtggtttaaaatgccattgcagctgggcacggtggctcatgcctgtaatcccagcactttgggaggctgatgagggcggatcacttgaggtcaggagtttgtgaccagcctggcaaacatagtgaaaccccgtttctactaaaaatacaaaaattagctgggtgttttggtgcgtgcctgtagtttcagcttctcaggaggttgaggcaggagaatcgcttgaacctgggaggcgaaggttgcggtgagccaagattgtgccactgcactccagcctgggtgacagagcgagactctgtctcagaacaagcaaacaaaatgccattgaagacatatatgaatatgaaaaggtgcttgctaaatgatgattgaataaaagagattataatataaaataggctttggtttttttaaagcaaaaaagaaaaggatatgcctaaattagggaacatggagaagaaggccaaggcatttaccttcctctcttgagtctttttctctctccgtctctgtttttttttttttttttttgagtcagggtcttgctctgtcacccaggctggagtgcagtagtgccatcatggctcactgcagccttgacctcctgagctcaagcaaccttccacctcagcctctccggagtatctgggactacaggcacacaccaccaagcctggctaatttttaaatttttttgtggagacttgtctcactttgttgcccaagctgctttggaactcctggcctcaagccatcctcttgcctaggcctcccaaagtgctgcgattacaggcgtgagccaccatgcccagctctctcttgggtcttaaagcaaagtgtcaaagacccagccaccacttcttagaaatgactcgatgtcatactagcataaatgcatcgataaaaagatggaaatgtggtaacacagtgatcttggggaatcctagttttcttttccaatttctttgttgttgcagtgagcaagtacttgtttcaagataggaatgaaatattcggctcttttagacagacaagcacaggtgctcagtttgggagaagaattaaaatcctctgcactctccatgctgccttgctaattcttggggtcctgtcctcatcttctactcttgccttctgcagggaccccacagtgtgttttccccgatctttttgtatcactctaaatccagtattgggcccagggagcaccccctcccctgcccccttcagctgtcctcctgcctgagtcttctggaagcttcgggacagaaagaacccaaggatttgtcatgaagctcagtgtggcaggtctactgtttccatgtaaatcatgtctgcttatctgagctggttttggtggaaactgatggaaattatggggaagctaaatccctgtctctctgcaagccactccccaatcccacccccatgaattggcattgtcacagtcctggtgcttcatttctttctatatttgaagatgaatttgagggaaatagtcagaaagtcaagaagaacacagcagaaatcaattggggtgagtccagaacaaaacttggggatcccacttcctgctttttttttttttttgagatggagtctcactctgtcgcccaggctggagtgcagcggcaagacctcagctcactgcaacctgtggctccctggttcaagtgattctcctgcctcagcctcctgagtagctgggattagaggcatgcgccaccacacctagctaatttttgtatttttagtagagacagggttttgccatgttggccaatttggtctcgaactcctgacctcaaatgatctgcccacctcggactcccaacatgttcatattacagtagtaagccacggcttctggccccaattcctgctctctagctccgggaaaacctgtggctgcatgcagagtcttagacaacttccttttcctctctgggcctcagtttcccattctgtaagatgagaggtttccataggcctacactttctaattggtggctttcaatcctctggtgatttgcataaaaggcatctatttcaattgtggttataaataacaaaccccaataaatagacgaattatttaaatggtttctcattatcactgaatagttgagagtctactgtatttgagtgaaaatgcagcacgagaaactgaaatcagatgcgctcatgattatgaccctgaggtcaatgtgtcattcccttcattccctccttgcccccatgaaggtttgactactgtatggtttgaacctgtgcttcttagttgtttattgcttaagttttagccacaacggcaaattgcagcgggaaattcagtcttactttgtcatttggaaacaaaatacaaaacctatcaaaataaagcactagcttttttttttttgagacaaaatggaagaaatcctaatattaggttagaaaagcaattttttggtgtttttaaaattttatttatttatttttttgagacagagtcttgctctgtcgcccaggctggagtgcagtggtgcgatctcggctaaccgcaagctccgcctcccaggttcacgccattctcctgcctcagcctcccgagtagctggtactacaggcgcccgccaccacgcccggctaagtgtttatatttttagtagagacggggtttcactgtgttagccaggatggtctcgatctcgtggcctcatgatctgccagccttggcctcccaaagtgctgggattacaggcgtgagccactgtgcccggcctctttggtgtgtattttgatgtggtgactggtagttaaattcagtgtacatatgaattcactcttgggacaaaatatgctggatttgagcttgttttcaggcaaatcatgtttcatcttgcagagctaattcaaagtatactgactgcatgcacttcttgcttaggggaagaaaactcatcaaaatttgtttctaggcatatgttattagagctaggattaaaataaatcttacatactttctttaatatgctaacattaacacgtttcgcttaaaaaagtatcgatcatttatcatggaaaaatacaccagcttacacaaattcctaaagcgtttttcgtgtgtgtgtgtgtgtgtgtgtgcgtgtgtgtgtgtagagatggggtttcgccatattgcccaggctggtctcgaactcctgggttcaagcgatccacccacctcagcctcccaaagtgctgggattacaggcgtgagccacacacccggccctaaagctttttgtgagattatatattttacctgcgaaatatatgggtcagaaagatttgagaaagttgttagataattccaccaacaaaatctcccgtcctttccagctgtgatggtgaattctaaagtagaattcatctttggagcttctccctgtaggcatgcaccttgcgttgcacctgccagatgtcgcgcggagtcctccaggcctctagaaggcagagatggtctcgtttccttgccgagcatgcgccttagttctctcttctggggctgtgaccgtggggtcgaagcgcgcgtgcgcggcggcggctggcggcggcggtggggcggggcctgggctgtcagccggcctaggaggaggaaggagcctgcggcgtgcagtgtgaggggcgggacccggctgccggcggtgggtctagctgggggaggtcgggccatgctggtgggccagggcgcggggccgctggggcccgcggtggtcaccgccgcggtggtgctgctgctgagcggcgtggggccggcgcacggctcggaggacatcgtggtgggctgcggtggcttcgtcaagtcggacgtggagatcaactactctctcatcgaggtgagcgcccgccccgccgcccggcgccgagtcgccgggccggtggttcagcctctctgggccgcgctggcctcgtctctgacaccgggcggtgtggagtccttggagcccttacctcttccgaggctatgctgtccgcgggctccctgcagcccctccccagtcgcgctggaggggaggttcttatcatggggtcgtctaaggactgaggggtgccagacctcaggttcttcaaaaccccgactccagatccccggaacacagaccccagatcctcaaaacccagaccctaaattccctggagcccagactccatttctttaaaacttagacctgagatctcctcgaatcagaccccctgaaactcagatttccccaaacccacattccagaacctagagaccacatgtcttatcccccaaactccacagcccagaaccccccgaagttctaatccactgctcctccaaaccccgcggcatgattttaaagagcatcaattcccatcccatagattctgacctagtagatcagtattggcaaccctggggccggaaagctattttttatttctccggctcccctccacttctgaaaatggagagttgccagctgccctgattgccttaatgagtagttaatggaattaccctagagatttgtgctgaaggttttttttttttttttttttaaattaagttgtaaagtcctgttaaatgtttatcagcccggtgggattatgacccagaaaggttcccgtaaagaggaaagggatggatggaggtaggggcagaatgtcatttgtcccggtagatgggaggggaccagagcaaggcctgggcctcatttttgggaggggatttatggtggggtaggacaaggaagaggaaaagagcgggtgcctcggaggtaatttaggagaaaacgaaggaagaggctgggaaatgccaaagagagggattggggaataagaccccaaagatcgtctgaaagcacctttgagctgttccagggctggcagtgaagggtgaagctctgtgttctgcaaagcgggctgctgaggattgggggaggggtagggagtcagttccacaccccaccagctctgcgacctgcccttgctctaggtttcagtttttgtacctataggatggtgttgggagagaaacagtggaacccagcagatacatttctttaacaagcggatccgtgatcttcttcaaggcccccttgtttgctgctttttcagactgaagaggtcagaggtcaggcattgaatgaatctacccactggcagcggcagggctcctaggatttcctgggtacatgtttctgggtgcccatgccacctcctaggtctgcactggggacaggacacgttcagggtggtatggctgtagacggcacagggcatttcagaagctgaaatgcaagaggccgctaaggcctcttgcaacttgtagtttccaggggttctggaaggaaggaaaagacaggcacccccctccaccctcaccctcatactaatagtgaccttgagagcagagaacaggttttgtgacccatttcaaagtgtgttccttaagcccaagggctgcctgtccagatggtgtgggacactcattctttcataagtaattcagattctgaaatcagacatttcatactggccatcttgatgtagattacattgccatcctgtgtcctgattgtactttatgaaagatgtagaaataatcatgatatttcacggttatttcttgattgtgttttttgtgttcctatgcaactgccgccattcttctctagctttctcccatcctgagtgtttttacatcgtgttcattgagtcaacaactatttactgagccccggcacatactgaagccttgtccccagtgtggatatagcagtacagtgaacagaacagacaaaactccatactctcatgagactgacattttgttctctaacagggaccttactgttaaaaaaaaaaaaaattatactggttgctaatactttaacaatcagcaggtttcacattaaaaactgggtgctttatttctctggaaaaccagccaatctttaggctgccacacttggcttgggttttgtagtgatctgaatccttttggatgaatgtcccttgatgttgcctccctaaccggtctagtctggtgaatttccagtccctgccttaaatgcatgcatctgaatctctttgtcacctgtagcaaattcactgagtacctagagtaagctagacactgtctcaggcactggggaatgaagttgtcactgacctcagagaactttacatacaggcttaaccttatttcacacgagtcctttcccaaatgttcaaatgttcgttttatgagttagtcactttgtacatcatcttagctggtgagattcgactgtttcatagcggctcgtgtcatggtttgtttcatggtcatagagcattaacattttggaggtgaggcttttaggtgcatcagacccaactgcttccttttacagacatggaaactgagcctcagagtggttgagctgtgcaggtacatttaggaaattttccttgagcccagtatgttccctacgtattacactgtgttgcctttttcttcagagagagatattaaatagtgatacaaactgctttttccattttacttattttattttgttttattttgaggcagggtctcacactgttgctcaggctggagtatagtggcaccatcatagctcaccaaagcctctgactcctggcctcaagcagtcctcctgcctcggcctcctgagtagctgaggctacaggcacgtgccatcatgcctagctaattttttttctagtagggatgaggtgtggctgtgttgtccaggctggtctcctgggctcaagtgatcctccttctttggcctcccaaagtgctgggattacaggcatgagccaccatgcctggccgcaaactgatttttctttgaatccatattctgtagcaggtgcttaatatgcattgatgtgaatctgtacaaccacatgaaaaggagtggctctatgtctgcacctgaagaaaccgaacacgagcttgcccaaggccacgcaacacgtggaagactcagatggcatttgggcatcttactgggttaacacttcgtgtctggtaatgctcagaatgtaagagttttagagagtccttgaagagaggacagatattaaatgtctttttagtctctttttcttcggagaatgaaagtaatgagaaaattaagtttctagatgaatgttgctccaagtatttgaaattattcagagttagtaaggaagatttctggccctcattgcagacctttagttgagaaatagaggtgggccccaggaatttgcaatttattttactttattttattattatttttgagacggagtcttgctctgtctcccaggctggagtgctgtggcatgatcttggctcactgcaacctccgcctcctgagttcaaacaattttcctgcctcagcctcccaagtacctgggactaccggtgcctgccaccatgcctgggtaactttttttgtatttttagtagggacagggtttcaccttgttggccaggctggtctcaaattcctgaccttaagtgatctgcccacctcaccctcctgaagtgctgggagtactggcatgagccaccgtgcccagccaggaatttgcatgttaataagcaccttactaatggcaaagtttgcaaatttgttttagacccggaaacttacacgagcaacctagaggcagccactaaaataaacagaaaagcattgaaaaataaggcattgtaataggctgtaggtggtttctaatctgaaaaacattgagtcacatgatttgggagagagtttgttgatttccctctgtccccagtaatgccccgtgttaaaagctggcatataataggtcctcagtgaatgtatactgactgagtgcattcaggtgtaacatgtgtagttaattcccaaaggcaatgttatgatttctgttttccttccttcctttccagataaagctgtacaccaagcatgggactttgaaataccagacagactgtgcccctaataatggttactttatgatccctttgtatgataaggtaagaggggactgcttgtcacttatgatgggaagtcactagtgtgcctcaccaggctgcattaaccatgtcctttcctacactagcaaatgctcatctgttttgtaaattattagtggaatatgataatcctagccacatttggagggagacaacttacaaactgccttgacgaatacagtggctctctctgtgtttaggaccatttggcaatgtctagagacgtttttgttgtgacatctgtggctgtgcgctacagtcacccagtgagtagtggccaggcgtggagctaaatgtgctacagtgctgcctacgacagcccagatgtcagtagtgccagggctgagaaactctgatttcatggaacccgttacttgcaagcagcttaaagtattgttaaaaaaattgtacaagtaatacatgaattcatgaactttgtgaaaaagaaagtcaaggtctttagaagtatgtgaaataaatttgtacccttttcgctccaattttacctccctctgtagtgataacctctgataatctgataaaggttttttttgttgtttttttttttcttcttttgagttggagtctcgctctgtcgcccaggctggagtgcagtggtgtgatcttgcctcactccaacctccaccccccaggttcaagccattttccttcctcagcctcctgaatagctgggattacaggcatctgccactacacccagctaatgttttgtatttttaatagtgatggggttttgccatgttggctaggctggtctcgaactcctgacctcaagtgaaccacctgcctcagcctcccaaagtgctgggattacaggtgtgagccgatgtttccggccctcttataaaattttgatgtgcatcctaacagattgctttctatttatagttattcagatatccacgggtacacatgcatatgtatatatggaaatacacacaagcacacatgcacatcgatatgtatccacaaacacctctatacaatcccatcctcccacatataaaccttttatttggaaatacagattcataggaagttgcaaaaatagtcaatacacatagttttgattttgatatattttttaatacaaatgaaatcaaacaataggatttattctgcagtttcattttttcccctgtgttaatgctttcaataccagagggacatttggttttttcctcttgcatgctttcaacattagcatagatagatctactgacttttttttttttttttgagacagagtctcactctgtcagccaggctggagtgcagtggcgcgatctcggctcactgcaacctctgcctcctgggttccagtgattcttctgcctcagcctcccaagtagctgggattacaggcacccaccaccatgcccagctaattttttttgtatttttagtagagatggtgtttcaccatgttggccaggctggttttgaactcctgacctcaggtgatccgcccacctcagcctcccagagtgctgggattacaggcatgagccaccatgctcagcctactgacttctttttaatggctgcatagtgtgtcagagtcaaacccaaactgtaatttatttaactacttggacatatagactttccccaattttaaaataatagtaattttaacataacacaccaggaaatattcttgaacttaactcttcatccagaatgcataggattgatttctagagatggactagctgggtctgtcctgaaatctatttaattaatttttaaatagtatcagtatcagtctcaagaaaccaggaggctggacgtggtagctcatgcctgtaatcctagcactttgggaggttgaggcaggtggatcgcctgagctcaggagtgtgagaccagcctgggcaacatggtgcaaccccgtctctactaaaatacaaaaaaattagccgggtgtcacgtggatgcctgtagtcccagctacttgggaggctgaggcaggagaatcgcttgaacccaggagacggaggttgcagtgagccaagatcgcaccacttcactccagcctgggcaacagagcgaggctccatctcaaaaaaaaaaaactaaaacaaaaacagaaaccagggttgataagtaaaatctagttttatttattgaattaatgagttaacgtattgtttagagacaggatccccttccgctgcccatgctggagtgcaggggcacaattatggttcactgcagcactgacctcctgggctcaagtgatctttctgcctcttcctcctaagtagctaagactgtaggcgcctgccaccacacccagctaattttttaagaacattttttgtacagatggggtcttgctatgttgcttaggctggtcttgaactcctggcctcaagtgaccctcctgccttggcctcccacagtgttgggattataggtgtgaggtactgtgcctggccaaatctagttttagggggtgcctttagttcctgaagatacatgctaacttgtgcaactgtaggcatgtgagggcttaatgggagactcaattaatagaattatagtatgtttagtattaaaagacagtgagtggctgaacctagtgtctttagaactcatgaatgggcttcagcactgtcttctgattgtttagatgaaaacttctggtgttcagcttcagcttgtagcttctgaagagaatcagtgctcagtaccatgtagaagaacaaggcttactcttagaatttcatttccggtgtaaaaaaattttagattaaatgataacactaaactaaatttagccagagtcacaattctcatttcttgaaattacattttctttttttccttttagggggatttcattctgaagattgagcctcccctagggtggagttttggtaagttaactgaatcactagacattctttgtaaaagattagatgatatgccgaatattaatttaggctagcagagtgcataaactattaaaatattaaggatcatttccagtatggaagagggtttgtattcctcccctccttgcccccatcactctggtttagttcggatttaccttaatctacctcaagactttctgtcacctttgaaaaatagacatcttttcttctacctttctggaaactcttcccttgcagtttcactcattacgtggccgtggaacagtatagaaatcaagagtggggacttggttcccatcccaggatggcttcttttttagccccctcagttttttaagtttttatggaattaattgaaacatttaaagattgtgagatttgtcataaaaatccagatttatgtcccatgagatgagaagactgtcagccttataccttaccagttaaataactttgggcaagttacttcccccgtgtcagcctggctcctcactgtcgagcaagggtagttatagtccctgccccactgggtacttggaggattaataaaccaatactgagtgttcagaggggctggcacgtaattagcaagtactcagtattcagaaacagcccttctgcacacatcccaacaaaagctccaaactttcctcatataactgccttcaagcatagctggggagttggggatggggttgagatcagaagagagggtctgttttgatgtagtttacatttttgaagaggagagactcttgatgtttcagtagagcaggtgtgggtgaccccagtccatggcttggggagaggagtagggatcaccgttgttgatatcaggcttgctcgtgcattagacaaggaagaatttagcacctgccatcaccaaggctaaaatgaggctcaggcagctgacagctaatttggctctgtgagagcagctcttttatcagtttatagtcaggggtagggtggggggtgcctggctggtacgttccagaaagctggagaggaatgcagccctgctcatggccaaagcagaagtccagattggtggcctggaggagtgttgtgtttgccaccccccaccctacccccaactggtgctgttgataagctttttaattgaattatactttcagaaaagtgccttggatgaattttcactaagtgaacacacccatgtatccaccatccagataataagatagcacttcaccagcaccccagaagtccccatcctgggtgctcattagccatcccgccccaccctccaggtgaccaccaccctgaccttctacaaattagagatccatttggtctgttttgaactttatacaaatgctatcatgcagggaactttttaatatccggtttctttcactcaacattatgaactttatctgtatcatttgtagctttagttcattctctttgctgttgagaattctgatgcataaatataaaattatttatattttataaaatacttatattttattttatttttttcttttttttgagactgagtctcgctctgttgcccaggctggagtgtgatctcagttcactgcaacttctgcccgggttcaagcaattcttgtgcctcagcctcctcagtagatgagattacaggtgtgcaccaccacacccagctaatttttgtatttttagtagagatggggtttcatcatgttgacccaggctggtctcgaactcctgacctcaagtgatctgcccgctttggcctcccaaagtgttgggattataggcaagagccaccacgcctggcctatatttatattttatattcatattttgtatcagtgatctcttctactgttgatggccatttgagttgcttaccgattttggccactaagagcagtgctcctgtgaacattcttgtatgtatattttgatacatgtgtctgcatttttgctgagtatatcacaggagtaaagtcgctgagccatagagctgatacatgctcagctttaggtgtttgcaaacatccaaagtggatgcaccagtttgtgttctcccagcagtgtacaagggtttccattgctccacatcctaacctacacttgatatcgtcagttttttttaattttagcccttctggtgggggtgtggtattatctcactgtggccttgatttacattccactgatggccaatgaggttgcacactttttcgtatgtttatgtttgtttgccatgggctagctatttttgtaagattcctgttcaagtcttttgcccattttttattggagtctttgtgtgtgtgtgtgtgtgtgtgtgtgcatgtacgcgtgcaagcacgtgtgtaattcatcttaactgaaaatctcatctcatggttttccatttttttctctactcattactccatattcttcctaacctttcaaaaactcaaccttaacccctattatgatgaactcttcagttaaaaaatggagttaattgctgatattgaaaaatcaagagatggtatataaaatccagatttccagtttttcggagaagttggaagctctggcaaagcatggtagtggttggcagacttgagtggcagttgtctcctttcaatttgccacagtccccctgaggatgctccgctcacttcgaacccatgaggcccctgtggccctggagtttgtgttcctggtttaacatggctgagctcatgtccttggtcagagaacagatccagagccagacttttagggttgaattggggctctgttactcagaagctctgtgatcttgggagctcctttaacctttctgtgccttaatttacccctcagtaaattgcagctattactgcctgtctcttaagataattgtgaggattaaaggcactcagctcagtgcctggtcggtgatgagcattcaggaaataaaattatttggtgctcactgaattttcactggaactctgagatataacttagctgaaaggcgttgtaaaattattttatactctaaacacgaattccctctggggcaggaaaccaggaggctagggggataggggtgagagggagacttttcccagaatactttttcgtacctttggatttggaaacacaacgagtgtattaagtgttcaaaagtaaaatgaaacctgaataataaaaatacgttctacttaggttcactgtaccccaaaactaagcttgcctttgtgtcttgtgccccggtttcctcccctgcttcgttcctcagagccgacgaccgtggagctccatgtggatggagtcagtgacatctgcacaaagggtggggacatcaactttgtcttcactgggttctctgtgaatggcaaggtttgtctttggaacttgattatttttcctgttcactctataatgtatactaaatccttttttaaaaaaatgcaggatattttaacctggggactttgatcccacaagggacccatggataagtggcaagtgagcctgtgaactctgtacttcatccgtgtagaacacagcaggtgtatttaggaatgagattgaggttgctggtcatcccctctgctcccagagcataggctgttggtgtttttatttttttattttttattttgagacagggtcttcctctattgcccaggctggagtgcagtggtgcaatcttgactcactgcagcctccacctcccaggttcaagtgattctcctgcctcaccctcccgctccttcaccctcccgagtagctaggattacaagtgtgtgccaccatgcctggctaatttttgtattttcagtagagatgggcttttgctgtgttggccaggctggtctcaaactcctgacctcaggtgatccgcctgcctccacctcccatagtgctgggattacaggtgtacgctgtgcacccagccgctgttagcgtttatgtcagggatggccttttacagggatgccgaattggaaggacacactctctaagccttgtggcatcttgctgtccctgtgggtgaattgaagtcagcttctcccagagagagcgtgcatctgcttctgacacttacgtaggaggattcctattatttaagttctgagatttttttggaccgccacggtggtgtgaatttagagtcctaacgggtgtgtgcccagctcccgtgattcagattctcaggggagagtcatttctcctccacccgccctgtgcctgcggttgagatgtgcttccttccttcctgtccttctcttcatgatggacttctttctcctctacctttgcggtgacggggaggcccttccatcccagctgtatgtgtgggcttcttgttagagatggggatcttgggtagttttttctttatcgatggtttgcaaaataatggtgaacctttttttatttttatttttatttatttatttttttgagacagagtctcgctctgtggcctaagctggagtgcagtagcgcagtctctctcaccacaacctccacctcctgggttcgagcaattctcctgcctcagcctccccagtagctgggattacaggcgtgtgccacctgacccagctaatttttatatttttatttttatgtacatttacttttttttttttttttttttttttaagatggagtctccctctgtcgcccaggctggagtgcagtggcgcgattgcagcttactgcaacctccgcctcctgggttcaagtgattctcctgcctcagcctcaggagtagctgggattacaagcatgtgccatgacgcccagctaatttttgtatttttagtagagacagggtttcaccatgttggccaggctggtctcaaactcctgacctcaagtggtctgcctgcctcagcctcccaaagtgctgggattacaggcgtgaaccaccacacccacccagaccaataatggtgaatctataactgatgatgtcttagattcattgaaatagagtcttattttactgttactgttccctctcctacctcatccccaggaaacatatccatgatttatagcatcttttcaatgggattcttgacccaaagagggttcctgggctccacctgggagttgtaagcaggactgccagtgctttgagaggagggtgctttgctgggtgggccctaactttcttctccatggcaggtcctcagcaaagggcagcccctgggtcctgcgggagttcaggtgtctctgagaaacactgggaccgaagcaaagatccagtccacagttacacagcctggcggaaagtgagtagcgtcctgtctcttagtgttgccttagagccgggctctgacaggggtcatggagctgggtttgggagtttggcattcagggagttctgggttcagatcctgattcagcctcttaagtttgggtgagttcatgcccgtcagagtgctgagttccccacatgtgaaatggaatccatttgacccatcttgcctagcattgatgagatgattaaatatgagttcatactggccaggcatgttggcttgcgcctataatgccagcactttgggaggccagtatgggaggatcacttgagttcaggagttcgagaccagcctggacaacatagggagactcagtctccacaaataatttaaaaaattatatcaagtagagtcccacgggggaagaaaattagctgggtgtggtggcatgcttctgtggttgcagctactcgggaggctgaggcgggaggattgcttgagcctggaaggttgaggctgcggtgagccgtgatcatgtgccactgtgctccagcctcggcagcagagcaagaccctgtctgaaacaaacaaaaaaagagttaatacccataaagcacctgcttcaaggcctggggcttagtgggtcttcatttagcagctcagcctggctctggagcctgccagcccgggcttgaatcccagctcccccatttgctggctggttgacctagggcaagttccttaacccctctgtgcctcagtttcctcttttgtaaatgaagataattgtggaacctatctcctaaggtactggaaagatgaaattaatattattacttcaagctgcctggcatattagctcaaataggttagctcagttatgattagaaaaaatcattatcattattatatcaaaactgctttgtagttggaacagatgcctagctgaccttgctgagtcagatttaaagcatttatttaatggatgtatatagttgagttgtaaatgttaacagatatgccaagattaataccagaatagttcaaactgataattccgaaagcgttcaaatcattactaactccgttaatatacaaactgagtaaattgcaaaatagaagtttataatgagtctgtcagtaagttattcaattttaaagttattattgttgaaactagttttcatttttgaaataacatttacttctgcttgactggtgcctctccaggcctggtgtgtagcaggaatatggagctgtaattttttttctgggctagtaatttggtgttgaccttactagaaaaaaatagtgtcttgagccttctgaatacctttcatctgcactaactgaaacaatgaaacatgtagcactgggctattatgaaaatgaaatagaagctcaatcttaccaatacttgtagtaatgtgatttccaagacctatccagttattgcaggcaagatttgacacaataaaataccacagaagaagaaatcaaatgcgttttctagttcatttcaccggacttagccttctcatttgtcagttgccttacaaatttgaagggataaacatgttagtatactggcagcagcatttccagctttagctcggctcactctggtgttagtctgtctatggctagtagagtaattttcatcagctgctggtttcttatctcagttgctttgtgcaaaaacccagaatgacttatctgtgtttctctaaagccttttttctgggattcaaagcttatcatagtttaccctgccctgtgtcatttgcatcatcttgggtcagcgtccccctcagcctgtgcatctgttctgttctttttcaccccacttctcccttcccatgtgtttccttggacacttctgtccccttctccttgtcagttcatgcctgtcacctctgtcaaacccagtcgaatgttctgtgactggtccctgctgtgctacaaggattggttttatgccagaaatccttgagattaagggagacgtaagcactcctctttccgatcagcacatggagcacccctcttggcacacagtaagtgctcaataagcgctcttttatgcagatttgtacagtgaaggattgaatttcattcatgctcatttaacaagctaatggaagtttgcgataattccaacattgttttcttgtgctgccaacattagtcatagaattagaaatacttgggttgtttggagaaagttaaatggttattttttatgtcttaggtttgcattttttaaagttctgcctggagattatgaaatcctcgcaactcatccaacctgggcgttgaaagaggtgagtgacagctacgtctatagccatgccaataatatgctggtcttgggacaaatgtagggcttttcaatttaggatatgaaaagaatttatggttcctccaggactagatgaagaaccaatggtgctgttgtttagtttggtagttatttataaggtgtaactcctcactgtagcagatgttgcttgtgttagtttcagttttaggtgacagtgttgtcttcctgctgtgaaatagatctgttttattaactatagctattttaaactaaatcaacaacagaaggccctgacgagatttatttgttgttcttttttcagcctgaaacagaaatctgtaaatatactaaacattctagaaactgtggtacgcgtgaccaaggagaatgtatgagaatgtttattgcagctttgtttgtaatagcaaaatattgtaaacaacctaaatgccttttaagagaagaatggattggggttccatcatacaataggctgctgtatgtcagcagtaatgaatgaaccagagctacatatatcaatgtaactacatttaaaaacagagttgaaggaaatatgattttaaatacttgtgataatcatttatggatacagtcttttttttttttttttttttttaaagatggagtctcgctctgttgccaagactggagtgcagtggcatgatcttggcttattgcaacctcggccttctgtgtccaagcgagtctccggcttcagtctcctgagcagctgaattacagggatgtgccaccacgcccagctaatttttgtatttttagtatatatgggattttgccatgttggccaggctggtctcgaactcctagcctcaaatgatccaccagcctcgggctctcaaagtggtgggattacaggtataaaccagtgcactcggccagatacagtctttttttttttttttttttttgcaacagggtcttgctctgttgcccaggctagagtacagtgacatattcatggctcattgcagcctctggttcctggccttaagcgatccttcaccttggcctcccaaggatctggaactgcaggcatgtgccactgcccctagctaaggatacagtcttttttttttgagatgaagtcttgctcttgttgcccaggctggagtgcaatggggcgatctcggctcattgcaacctccgcctcttgggttcaagcgattctcctgcctcagcctcctgagtagctggggttacaggtgcctgccaccatgcccagttaatttttgtatttttagtagggacagggaggatacagtcttatgtagaaaaattataaagacatgtatgggaatagcagacgctgttcaaaatgatactgacttctagagaaagagggaggagggggacttcggggtacgccagcatcttgaattgtatttttttaaatttctttagctggttagaaggtatgtaagtgttctttagcatatctttttttgtttgactgaaatagtttatagtcaaagatcaaaaaaggaactccacctagtaggtgaggttctgtaatagccgtgaaagaccaaattgaaataagacttaagggacatcttgacatgttagcttctgtgttagtattgaagctgtatctcatttttgctaaagaagcattggaatcagtatttcagcttctactctatctgttttattattatttttactctgtaggttttacgcacttataattgatgatagtttcacacctagatgtctcttcttactgtttgtgacttttggttttgggggtttttctcttctgcagcaacatttaaaaatattttattcgaggctgggcgcagttgctcatgctgtaattccagcattttgggaggctgaggtgggtggatcacttgaggtcaggagttcgagaccaacctggccaacatggtgaaaccgcatctctactaaaaatagaaaaaaattagccaggaatggtggcatacacctgtaatcccagctactcgggaggctgaggcaggagaatcgcttgaacctgggaggtggaggtagcagtgagccaagattgcaccactgcacttcagcttgggtgacagagtgagactccatctcaaaaaaaaaaaaaaaaaaatttattcgaaatgaaagagcttacacatttataaatagaagagattttaaggtttacattgtatgttaattgtctgcatagaagaatctgagtttattaatatgagattgggattttcaagtaaagcatgttgttagaagtcaggataatgtttatcttcctggggtgttagtgaccggaagcaagtgtgagggcacttctggcttgctggtgctattctgttgggtaaccagtgcccaatttgtgacaagccctgtgctgcgtgcttagaatctgtacacttttctctgtgtttattgtaccttaacaaaaatgtttaaaaatatacacatattgtgaaaagaacaacttaaggcaaattaaacagagtttaattgagcatagaacaatttgtcaattgggcagctccctgagccagaataggtttacagcgactgtggcactgttgcgtgattggaaagggtttatggacagaaaaagaaagtgacggacagaaagtggaagtgaggtacagaaacagttggattggttacagctggacgtttgtcttatttgcacatggtttgaacagttggctgcctgtgagtagttgaagggtggctgcttgaattgggtgagacttggcaacacgtaagagaaacctttaggccaaacttaaaatatgtaaggaggcagctttaggctaatcttcagttaacactatatatcattaaaaatagaaaaaaaggcaaaatatgctcattaaaaaaattggaacatatagaggaatataaagcagtggaaacaaattttggaagctggaaaagtatacaagtaaaatagcaccatatagacaaaatcattattgtttacattttgccacatttcctttcacttcattttgggcattaaaaaataatgataagccaggcacggtggctcacacctgtaatcccagcactttgggaggctgaggcgggcggatcacctgaggtcaggagttcgagaccagcctggccaacacggtgaaaccctgtctctactaaaaatacaaaaattagccgggcgtggtggcgagcgcttgtaatccccgctacttgggaggctgaggcaggagaatctcttgaacccaggaggcagaggttgcagtgagccgaggttgcaccattgcactcaagcctgtgtgacatactgagactccgtctcaagaaaagaagtgatcatactgaataagcaattttatagattacgtttcccagttaatattttagcttcagcgtgtcctcatgttgttaggcactttgcaagtgtttatttttttacaggttaaaatctttttctgttacaggcaagcaccacagtgcgtgtaaccaactccaatgccaatgcggccagtcccctcatagttgctggctacaatgtgtctggctctgtccgaagtgatggggagcccatgaaaggcgtgaagtttcttctcttttcttctttagtaactaaagaggtaagcaaagaaaagaacaaaagagatggtgtgaagggtaggagggtgggggattatagaccagaacgtactgttttaaaaaatgcaggtctgagttgatttatcattttaacacttaagaatatcgtctgtctcaggccgggtgtggtagctcatgcctgtaatcccagcactttgggaggccaaggtgggtggatcacttgaggtcaggagttttagaccagcctggccaacattatgaaaccccatctctactaaaaatacaaaaacattagccgggcatgttggcacgtgcctgtagtcccagctgcgtgggaggctgaggcagtagaatcgcttgaacccaggaggtggaggttgcagtgagccaagatcacgccactgcactccagcctgggtgacagagtgagactctcaaaaaaaaaaaaaaaattcaagaatatcatgtgtctctgttgactcacaagacattgcacatctacactgggaggcagtggtatgtgatggaaagtacacaggctttgaaatcagacctgggtttaaacaaatctcagatttaaacaaattcctcttcctagctatgcgaccctgggccggtcacattaccttcctgagcttccgtttccttatttggagaatggtgacccatgataaggaaggacagtcatgtcatctttcccgggaagactgtgccagtttttaactttgcaacttgaatgtcaagatttttgttccttttatctgtattaatgtgtcttagatttcagaaatacatatattgacatgaaacttaaaaaaattttcctataatgtggctaattgatggtattcagaacatgtaaatggaaaaggaagtcttgtcttttttaccccctggcataggatgtcctgggctgcaatgtctcaccagtgcctgggttccagccccaagacgagagtctggtgtatttgtgctacacggtctccagagaagatggctcgttctctttctattccttgccaagtgggggctacactgtggtgagtgaagcagatttccgttctgtttatgtctgggactctcatgacacagtaaaagccaatgctgtttgggtgttaaaggaaaagatggttggcctgcagttctctgaacatgctgttaagcagtaacttacttaagatgagacactcaccccttcgtaatagctacaaaaagggcaaggcttcctcttttcaaatctgcaacagttatgatgaatgtttctcttggtctgtctgaaccccttgtcatttgtgggctgctagatcgattattaatattgctgattgatcatgttagtggttcttagtgattaagagactcttccttccagattccgttctatcgaggggagaggattacctttgatgtggcgccttccagacttgacttcacagtggagcatgacagcttgaaaatcgaggtaaggcttttctgtcttctggagggacaggtgtttgagttcccatccctaggcacaggtattgcaaacatgttttaaaaaaaaatcaattattttatctggaagggctgttggaaaaaatgccatctggtattatattcttacccatgatgtccttatcgtagagagctggattcctagttaaatctactcattcaatgaaatatatttattgattgccagtgacatgcatttcaggcaccattccaggactggggatatagcagtgaccaaaagaggcaaaaattcttgtccctgtggacctcattttttttttttttttttttttttaagacagggtctcactgtgtggctcaagctggagtgcagtggtacgatctcatctcactgcagccattgcctccagggttcaagtgatcctcccacctcagcctgttgagtagctgggaccacaggcacgtgccaccatgcccagctaatttttgtatttttgttagagatggggtttcaccatgttgcccaggctgttctctaactcctgggttcaagtgatctgcctgcctcggcttcccaaagtgttgggattacaggtgtgagccatcgcacctggctagacctcatgttctaatgacaggaagggtcaatacatgtatagatgtataagttagaaagtacagtagaaggtgataagtgttctctagaaaaataaaggaagaaaggaggtagtacagtatcagggtggagacaggggttgcagttgtacatagggtgtttttgggaagtcctccctgtgaaggtgacatttgagcaacaacctgaagggaaagaacaagagaaccatacttcactcctgcaggaagagtgtgtaagactgagggaacggcacgtgcaaaggtcctgaggcaggagtgtgctgaagagtttggggcatcccaaggaggccagggtggctggagtggagggaatgagcaaggaaggaggaggcggaaagagggtcagggaggtgacagggcagattgtgcagggcttggtgggccactttgcctataactctgggtgagaattggtgccactggaaggttcctagcagaggagtggcgtgatccttctggcagctgcattgaggagagtttgcagggtgtcagggtggaagtgggagaccagttgggatgccatggccgtaaaccaggtgagaactggcagagcttggaccgtgatggtaggaatgggcagtgtgatacatggcttgataaactgcctagaccctcacataaatggtaaatgtatttttcatctcacttacgtctcctttaattacagaagtagaaaatggttactgtagaaaattggctagctagaacaaatcccaaaagaaaataacagcctctcctaagtggaccacccaatgttagagttatcgaagcaattatattttaatcattttcttttaataattacatttgaaagtactgtgttaaaatcgcttaaactggcagaagcggacttttaggtcatatgcacagtggggtgcagactctgcattttaagattcagtggagtgtttgaccgttctgctgtacactggaggggaaagagaagggtaagaagatgaagcctttactttgcttctcgtagcttgcagagaaggatgggggcaggtgagcagagacagctattcccagattacagccaaatacatattttgaaaatgatgaatggaatttcagggaatggggccctgtaagttccctgaggtcaggtactgtgtcttattctttactgttttcctaacatgtgatttagtgcctggcacatagtaggtgcccagcaaaaatatttgttgcgtacatatgtgaattaataagtaggtaatgcatggaatgaaacatgtctttttggaaagatcaagaaggactacctgtcatgtgagaccatcactaagaaaccatttgctgaaaaaaaaaataaaaaaataaaaaagaagggctccctgcataaaaaggaagtcatttaattatttaaagcttcatctcaaatgctgttgcacacgtgcgtgcacacattcattcattcaggagtcagttattgagtgcctgctgtgtaccaggtgactaagacagaaaaagtccctgtctccatgaggtaacatgctagtgggagggagacaactaagaaatcgaacgaggacatttcagatactggtaagtttgatgaagatattaaaataggttagcagtggtgaccttggggatacacagatcagggctggaactcagtaactgcagagaaagcacagctgtgctgctcacaggcgagtggggcacagacacagacacagacacatggagcacgggaccacgtgtgagccagtgatggtggtggaggagggtggtctaggtggatttctttttttttctttgagacagagtcttgctgcttcacacaggctggcactatcttggctcactgcaacctctgcatcccgagttgaagtgattctcctgcctcagcctcccgagtagctgggattacaggcgcccgccaccacacctggctaatttttgtatttttagtggagacagggcttcaccatgttggccaggctggtcttggactgctgacctcaagtgatctgcctgcctcggcctcccaaagtgctgggattacaggcgtgaaccactgcgcctggcctaggtggatttcataaggacctgtgttcaggtcgtggtggaaagacaggaggggacacgtgagaccttgcagaggtggaatccacaggactgatcgatgctggaggagcggggcgggtcatccaaagtgatgccggggtgtgcatgggagactggaggaagacgtggttcaccaaaatgggggcatctggaggggaggagatggcacaggggtaagggtggggggcttctagaagcttgagtcagtgaccttttaacgagggaagtaagtctctagacttttcttttctgttgtttgacactcagcagtgtgttgggaacacaacagagaagacagatgtgggtaaagtgagagggagcccggctggcacacaggaccggggcactgagtgttgggaggtgggcggcaggagcagacatggtaggtggtggccggcgcagcagaaggaggctttgtggctctggcacaggagcaccttcgagcaccttcttgttctttgttttctagcccgtgttccacgtcatgggattctccgtcaccgggagggtcttgaacggacccgaaggagatggtgttccagaagcagtagtcaccctgaataaccaaatcaaaggtgggctgacacagcagccccaggctgatggccagcgctctttttggatcacagagagaaatggagaggaactgatgactatatgagaacatggcagcttttggtccaagtattctggtgtacatgtaaggatacactgttgtttttggcttatcttctgtttgtgtgtttttgttttacagttaaaacaaaagctgatggctcattccgccttgagaacataaccacagggacatacaccatccatgctcagaaagagcacctctactttgaaacggtcaccatcaaaattgcaccaaacacacctcagctggctgacattgttgcaacagggtaagcttatcgtgtggatttggaagcaccagtaaatatgctggcagccagtgtagaaccaaatgacctgtgatctgtgtgtctttgccgagcttaagaacttaagaaagattagtactttttttttttttttgagagacagagtcttgccctgttgcccaggctgtagtgcagtggtgccatctcgactcactgcaacctctgcctcccaggttcaagtgattctcctgcctcagcttcccaagtagctgggactacaggcgtgccccaccacacccagctaatttttgtattttttagtagagacagggtttcactatatgttgtccaggctagtctcaaaactcctaacctcaggctgtctgcctgctttggcctcccaaagtgctgggattataggtgtgagacactgcacccggccaagaaagattagttctaaatcttacaaactgaaggtactgacatgtcggatgcttaatgaaaagtcccttgcttcaaattaaaatgggcttgtgaaattaaaaaatctttcatgtctgactttcacgatctttcacaggacccctctttgcttaatctttgaggatttttggaagatggtattgttggttgagaaagcttattggaagatgcttcaggtcattggtgtagttcttcctgcttgtagttactcattatactataagtacaggcagggacatcttgtggttgaattcatgtggttttaccatcatctgaagcaagattgtgtagtgccaagaacttgggctttggagtcagatcccagatccacctgtatgtaacctgcagaacagctttagacataacaggtgctcacaaaacagtagcttagaaggagactgcagggtctgcttgggagaagcgcggcatgagcaaagtcaggcagtctcacagcagcatgaggtggctgcgggtgtaaagctgggtgctactggagcagaatatactggcaggtgaaggtgatgatgaggccaaccccatagcacctcctcacaccccaccagggcgtaggggctttctcccactggggccaacgggccatgagtggttttgagcattaatataacaagctttgatcattgttttcaatagggcattctgaaaacaatggcatggagtagagtggctttgaaggggacaggacttgggcacaggaggtctgaaagcagagacgacaagggcttgccttgtagggaagtcagggacagactggtgagatatttagggtgcccagcttgagaggtgtgatggctggggacagaaagagaagccagttaggtgatgaggtttcagatttggccacattggtctgtaggaccactaggtggagctcttcaataggtacttggatggatggtaaatcctgaagatttggccgcaggtggcagccaggacctcaaatatgtatgtgcaagtagaattagaagaacagtaggccaaaaacagagtgccaggtggcccagggggggacctagggagcctgaggtcataggagctaagaaagtaagtttggggtaggaggtagggcccaacaggtaggtgcagggagctgggccctggtgaacacagtcccctggcttgatcactgaggaggccacagtgactcttttctgtagacagatggaggtcaaggtcaaggagtccagtggtgaatggaagacagggaagcaaattaccctcagaaagtaattcttggatttaagtctttcccaccttccataaacactttgtgcaattactctagatgaggcactgaaaaatgcttcgtacctaataattaatcaaactagtgttccagagatggggctttcaccctaccagggagacagactgaagacaaatacatctgtggccaggcttaatgcctcacacctgtaatccatcccagcactttgggaggcagaggtgggcggatcgcttgagcccaggagtttgagaccagcctgggcaacttggcaaaacaccatctctaccaaaaatgcaaaaattagctagtttcataacctggtctaaaaataaataaagagataaaaattaaaaaataacaagatttttaaaaaagacaaaaaagacaaatacatttatgctgctaaattatggcaagtgttgtgcagggaagagatcagggtgctgcaagaagagctaatttagagtgggagctctgcaaggctctctgggttgcagagaccttagtaaagactaaaagttagctaaagaaagatcttccctagtagagaagcagcatgctcagaggcctgcataggataggaaggacctgaaaggcagtctgcgcagctggaggaggtgggtgaggtcagggagctctggggccttgtagccttgctttgggattgggctttgctccctaatgcagtggaaacccgttaggagttgtctgttggttggccgggcacggtggctcacgcctatgatctcagcactttgggaggctgaggtgggcggatcatgaggtcaggagttcaagcgcagcctggccagcatggtgaaacccggtctgtactaaagatacaaaaggttggcggggcatggtgatgcgcgcctataatcccagcaactcaggaggctgaggcaggagaatcgcttgaacccgagaggcaggggttgcagtgagctgagattgtaccattgcactccagcctgggcgacagggtgagattccgtctcaaaaaaaaaaaaaagagttatcagttggcaagggagtgatagggatcatggtactttaaaaagtttgtttttcttcctggctgctgtgtggagaatggattggaggaaagccatggtgtgaatggaggggccagatatgaggcagtcgtggttgtctggaggagatatggtagtggctgggcccaggcggctggcaggcgagggagcgaggagtagatggatttggtaggtcacatggagaacacacccacaggcctgtgctgttgaggttacaggtttcttatttgagccactgggtagatggaggcggtgctgttcacggagatggaggaaatatatttattttctcctttaaagtagagtatttgggtcaaagaaagaaaaatagcatttgttgaacatttttggaaaaatctcttttttttaattggccgatgtagtacacttgcctttttagcacactgatacttcttactatttcttttcctttttattttttgttgagccagggtcttactccgttgcccaggctggagtacggtggcgccatctcggctcactgcagcctccgcctctcgggttcaagtgattctcctgccccagcctcctgagtagctgggattacaggctaatttttatattttttagtagagatgtggttttgccgtgttggctaggctggtctcgaactcctgacctcaagtgacccacccgcctcggcttcccaaagtgctgggattacaggctgagccatggtgcctagtcttcctttaaagtaaaataaaaaaattactcaatttattgtaaaaacaaactctttggcttctgtccaaatgactgtgaaaatagatttctctcaatatccaccaatattacctgtttctgtccatatatgtatttaaaccctgttgaaagaatttattgatacaaatcaatttttaagggcttcagtataacggaacctttttctaccacccttttggtttatttttccaaactaagccagtatagatttgaggtttagggaaaataggcacttctttttaataagaatgtgggctaaaacagatcttatggttcaaatatttacaacttaaggaggcaaagagatttgataggaaatagacaaggtgatgtgtcctctgacaggtacacaaatcaagagaatatgacaggtccttgggaatgattgtgtcagtgttcgcttcccatccttttattctgaaagttcacagtaggggaatgtgagaaccaaaatgcatatgctaggtcagggactgggacactttctctgtggagagccagagaataactattttaggctgcgtgagccatacggtctctaggacaacagctgagatagacatttgtaaatgaatgggcagagcgcaacacaactacatttttggacaccacagtttgcatttcatgtaatttttacatgtgaaatattatctttcttttgatttttttttttaactttaaccacttaagagtgtaaaattctttttctcggcttgcagttcatacacaaacgggaggggggtccttgggtggtagtttgctgacccatgctggagatagtgagctcatatggctgggcagtcccttcactctgaagaaatggctgtgtttttcataattcctagatttcacatacacaatcttccaccatttccttgtgttttccactgtttttttatttgaggcggagtggtggttccaacatttaatgtacccctaattgtcagaatccaacattcttgattatctttatgtcagaagtaactaatttttatctaaaatgattcttgaagattctttaaaatgaacagttgaaaagacaactgtgacccccagctaggatgtactattacactttaatacaccagctgcttcagaaatgaagaccagcactccaaggatgatggtcgttgtaggggggcctctcgtgtgttattcgagggatgccttgcaacaccttactccttatttagaatctcaaatctgaatcattaccttaatagggcttttcagttataagttacattgtggctcctacctcccaaggagttcaattttagctttgcattttttaacttaattaccttttctgttccaatctcccagtttgctttcatccatgtattatatataatcacaagcaaggaagacgtctttgataatcctgacttatttgatggcctggtaatgccacagtttcttaggcagcttagagctcttgcttttaagggctagcccacattctcagtccaaggccgctctgctgtcaacgatccaattacctgaaacgtttttattatctgcagattttcttaaaattgcctctgcagtgggggattgccagatgtcacccggaacacacaaacagccccactacgggcccctgttctgtagaaagatgcccagtcttgcttctgaaggttgctttttaaaaccagaatgaaggttgctttttaaaaccagaatcatctggattgcattctgtctcttcattaagattagactattctcaggaacaagggctgggagagggctgcatcttttttggtcgataagagcctttcctgttataattgagtcctcgtgctggaatgaatggtcttctctttgcaggttcagtgtctgtggtcagatatcaatcattcgcttccccgacaccgtcaagcagatgaataaatacaaagttgtcctgtcatctcaagacaaggacaagtctttggtcaccgtggagacagatgctcatggatcattttgttttaaagcaaacccagggacttacaaagtgcaggtgcgatgcattgttttaaatttaaaatgttttgagaaaaagcagtgatttttagaagggttattaggtcgaatggggttagagaaggagcattccagtttccaacttcttgtttttaagtctttacaatcctgcaccagtagaggagagtcagataggcatccagctaaaaaataatgccatctgcctctcttttttccagtcttgatggttattagtatcaggctgccagtcactcctctaccttcaggcttctggctgctgtagaatgtcgatgagtccaagaggacaccaaaaatgaactctactaatggccgctcaaaaatggccatagtgcgtggcttctgggaccccaggccaaaatggagcttcccatttcctgctttgccttgacttcaagatggctaggcagggaccacgcgacttatccattcaagcaggccgagaacggggagacggtctggcctgtggtctcatcaccatggtgaaggcccaagccacagctggcccaagcaagcaagagacaggacagagcagaggtcagcccaccatgcctttcagtgcagtggccctgcccttggggagagactgtttccgtgggctgtcacccatcaaatcagcagctgcccttcctccctgtggaagagcaaataacacaaagggagagggccgagaaggttccctgttagactctgctgtcctctagggcaaagtggggtccctccctctgtgggaaacagggtaggagattgcgttctccctgcttccacagaacagcgtggtgtgtgggttgacagctgactttattagatggtagctggcttcttgcgaagatgtccacattgacaagtctttggaagccctttcggaagcatgatggacttctccaaggaagggcagtgtcgtctttactagggatgaaagagttgaccgctgctaccttcacctgttcctcttcttagcccatgaaaggcacgcagaacaataggaggaagaaaatgacttaattccaccaaagtgtcatccacatagtgttgacaggttcagagcttatgctacaagtgatccgaagccgggaaaagtgactgggatgtagtatggtttctagtatgtaagtgaggcgtgtccgcgtcgcgggcctgtggggaattaggccagatagacttttgttcatacacatcggtctgttgaggctaatttttcatctgggtagaaccgtgcttacttcacacaagttattcgtggatttgttgtgattgtaaaatcagcctggaaacgaacctttggccttcaaaatctctttagccttggtcccagatgaatgttctagcgccctgtaggtcagggggaagatctccccgaatgcagcctctaacgttccatccacgtttccgcaggtgatggttcctgaggcagaaaccagagcagggctgacgttgaaaccccagacatttcctcttactgtgaccgacaggcctgtgatggatgtggcctttgtacagttcttggcatcagtttctgggaaagtctcttgtttgggtaagatatcactggaaagtaagaacacatagtttcaaagaagtcagccggtaggagtgggatttgggaaactttttgttttgcctttgttgtttgctactgatcacctgcgtgcgagggaggcttcttggagtcaggtgggtacatcttaacttgaaagaagcgctccgtctgcctccggccactgcctcttaggagctcagcagtagcaagaagctattacatagggttaggattcgaacctgtgctgaagccttataaggggtcacatggagccctcccttcttttccctgcagacacctgtggtgacttgctggtgactctacagtccctgagccgccagggtgagaagcggagcctccagctctccggcaaggtcaacgccatgactttcacctttgacaacgtgctccctggaaaatacaaaagtaagaattggaatgcaacatcctgtggccctcacacacttcttgtctttgtaaactttctaaaactcaggtctcaaattgtatcacgaccatgtacctttccttgttttaagtcgtctttgcctcgtgaccttgactgcattatttagcgttggacaagcatggaggagtccaggccctgagctgaccaccaccttgtctgcacagcccactggcggcttctgttaagggagggtgccccgacgtatggcattttatttctaaagcccagagaaaggagtgtgaaatagttccactgatgtgttctactaacttagcagtactggtgctgagtactggccatggcaaggtacttgacctccctgaaactcagttttcccatctgtaaaatagacataatagaacctttctgcagaatataagactaaaagaagtaaagtttataaagcccgttgtgcagagagccagctaagtagctggtgcccacaaatgttacttcccttttccttgcccttcttaagaagccacttcttgcctgtatttctgctttttcagaaatcagcttggggctgctggcagtggatagctcataaaacagactgctttttctggaattatattaatattttctgttatggcagggcttggcagactacaaaaactgccttttataagcgtagtttccttagaatacagccttgcccatttgtttatggattctctatggctgctcgtgtgtaacagtggccaagtcgagtggttgaggctgacaaagcatgtggcctgcaaaactgaaaagagttacagaaaaagtttgtggatccctgaataccttacttgcagcctgatcttacaggccccattagatttctttcttgatgtaatggaaattggttccagtttttctttctttttttttgaaatttagcctcgctctgtcacccaggccagagtgtggtggcgcgaccttggctcactgcaacctctccgccttctgggtgcaggagattctcttgcctcagcttcccgagtagctgggattacaggcatgcaccaccatgcctggataacttttgtatttttagtagagatggggttttgctatgttggtcagactggtcttgaactcctggcttcaagccatccaactgccgtcagcctcccagagtgctgggattataggcatgagccaccacgctcgactccaggttttctttagcagtaatttattccaaatactgctagttataaatatatgtatgtgtatatttctatctttatgtctacatacacacctgctttttaaaattagttaattcatgatcattgtttctggtggcgtgcagggaggtggtgtgctccacgcccatgtatccgtttttggtgtttgcttttgcagtaagcatcatgcatgaggattggtgctggaagaacaagagcctggaggtggaagtgctggaggatgacgtgtctgcagttgagttcaggcagacgggctacatgctgagatgttccctgtctcacgccatcactctggtatgtacggcttatggagtctcttatttggaaaagcgcttgccttgtggatgtcaagaaagactaacatcccaggaatattgtaaacgtaggcaagtcagatttccttttctgcctctgcactcacccacctgttacgcaacgcataatcaggaagcatttatactctctcagtggaaggacccctgtatttaggaggtttccttgtcctggccctacactaaatctgactggtgattcggggtgacctttggtacagtgtagagcacactggctttatattattagtaataatagctttgggtaaattcatttactgcttctcagcctcagttttcaccgaaaattgagatcttaatacctacttctcagggttatggcagggcttaagtgaaccctcttaggtatcaaagtgtccttggtgtacaccgctctgtactgccaagtgagtttctctgatatatatatatatatatatatatatatatatatatatatatatatttttttttttttttttttttttttttttttgagatggagtcttgctctgttgcccaggctggagtgcagtggtgcaatctcggctcactgaaacctccgcctcccgagttcaagcgattctcctgcttcagccccccgagtagctgggactagaggtgcgtgccgccatgcccagctaatttttttcttttttttttgtatttttgttagagacagagttccaccatgttggccagactggtcttaaaactcctgacctcaggggatccacccgcgttggcctcgcagagtgctaggattacaggcgtgagccattgtgccccaccttctctggtgtatttgttccagtgcaggggaagaagctgtaaacaggatcttagcttcttgttgactgtggtctctgtggcctgaaaggcagtgtgaaatgggtttcaggagcacctctgtagatcccttcgtgaattttctataatgttttgatgtcgagcggcggcagatgtcatcgtcaggtcttagtttctctgtagagaaactagaagaattggaactggtgtttcatgtgccaacttactcccctaactgcttaattacaaaaactcgacaggtcgatttgttataggagatcgattaatatccggttcataataagtgatagatatttaggaaacctttcccttccagcagtggagtggatttccagctctcttgtaataagatccttttttttttttttttttgacacttccttaaccccttctttatctcctcccactgtcccctcactcgccgggccccagccacagtggtcctctgcagtcccacaccaagctcactccctcctcggggcctttgcacatactctcccctctgcctggagtgctgtgacttctccagaaacacgtgttgttggtttttcctcctcattcaggtgcagccctattgttcaggagagatgtgccctgggaccagcgagctaaagacccctcggtggggattgttcttctcttgctttcctgtttattttcacagcttcgttactgaccagttgagatcactaatttatttgttgttgcgttgattttgtcttcctgtattagaacataagccctgtgagagcaggagccatggtcatgactcccaaggcccagccttgtgtctgtcacatagcaggtgctcaataaatattagttgattgaatgaaaaatagcacacttttgttggaagttttgggaggtttttaattttactgtggcacccaactgctccaatgattaatgggcaaaacagatgactggtttggaaagagaaatattattaatcatcttggtgtctccatctctcttagtaagtcattgtattggctttgctcccttaggaattttatcaggatggaaatgggcgtgagaatgtggggatttataacctctccaaaggagtcaaccgattctgcctgtccaagcctggtaagtttggaaggattgatgtgccatgaattagaaaaatggaaaggcaccagaggatggttttgaaggcatttttttctaccttggttctgtttgcatcaagctttcaatttctgtgtgttcaacctgctcttgtttttctgtctgtcttgggtttgagttgggtagacaccactgggccctttcacctccaaaaatataccattggccaatggcctctctttatagtgctgttttaaaatttgaatcatttcccactttgcttaaaatctttcagtggcttctcactctttctcattttttttttctctttctttttttgagatggagtcttgctctgtcacccaggctggagtgtagtggctcgatcttggctcactgcagcctccgcctcctgggttcaggcgattcccctgcctcagcctctcgagtagctgggattacaggtgcccaccaccacatccggctaatttttgtatttttagtagggatgggtttcaccacattgtccaggctggtctcaaactcctgacctaaagtgatccgcccgcctcagcctcccaaagtgctgggattacaggtgtgagctgctgcacccaaccctctctctcttttataatggctttttttggaggcagaatttgcatatcataaaactcacctatttaagatgtacaataaaatgatttgtagtaaatttatcaagttgcacaaccatggccagaatccagttttagatttgttcatcacccacaatgtaagatcctctgtgcccgttgacagttaatccctgtttctagccatggccagccactgatctattttctgtccccatggattggctttttttggacgtttatcatacgatgctggtattttgtttggcttcttttatttaacatgtttttgaagtttatctgtgtcatggcacatatcagtagtttgttctgttacattgctgtgtagtattctggtgtgtggttatatcatattttgtgtatccatttatcagttggtggatatttgagtggtttccagtttgacgctgttatgactaatgttacggacattcttatacaagtctttgtgtccgtatgttttcgtttttcttgtttcgatacctaggaatggaattgctgcattgtgtgataagtttatgtttaaccttttaagaaactgtcaaattgttttccacagaggctgtgtcatttgatattcccaccagcaatgcacgagggttccggtttcttcacctccttcgccaacatttgttattgtctgttttattatagtcatcttggtagatgtgaagtcgtgtctcattgtggttttgttttgcattttcctaatgaataattcagtggctcctccgtttggttcccaagataaaatacaaactccttaacctgatcttagctcctgtgtaacccagccctgtctgccactgtctctactccagccactctgtccttctgggtgtcagttcagctgcctttggctacatgtaacaaaatccatacagcagtgccattggcaagtggtagtttatttggctcaataaagaagtgtggcagtgcgtggctgccagcatgggttcagcagctggtagatgttaggggtggtgtctttgtgattctttaggcctttcccttctattttttgccttgtattttcaagatggctgtggttagaaaacttatgtttaaaggaggaagtcaaggagagggcaggcaaacatttccttgcgccccctcctccagtaagctacttgtctgtattattggccagaaccgtgccacatggttacttctagctgcaagggaggctgggacagttggatgtgctacccgaggctgagcacgttgccaccctcaacataaccagggtttgttctcaaggcaggaaggatgcctgttgaggaaacaatgagccagcctgtgaggcagatgctgttctctgtggacatctcctcctgcccctcctagctggggccttcttacccatcagttcagtattgcttcctggggaaggatggcctccagggccacttaggcctgcctcctacactcttgctctcagcactcacttctatccccttcttgcatgtgccacaattgatatgtttgtggctgtcaaatgctccccctctctgtggatggtaaactccatgaagacagggaccactgctctgtcattccccactgtgtaccagtacctagcataatacctggccaggaagagatgctctgtcgatatttgttgaatgaaagaccaaacaaaacaaacagagaaacctgatttttttttttttttttttttgatggtaactactctggggcttgttgagtgcaatgaaaacagcagggtggttttagctaatttcaggtttttgtaggaagtgtggccaaaatactggttaatgatgatttgggggaaatacattgttattccttgtatcttcctgaaattgactgtgttcctctggcaagtgatgaaatgtacccctactcggagtgtcctcccacacagactcacacttttctggggcttcccttactccttacctcctttttaggaatatttataggaagaaattgaggctgtggttatctcttggatccttaatagaatcttttaagtaggaaattatcctcagtccaatttgcagtagaaacgtactttctgttccttctcgtgcatgggtccgttcacctggtctgtgcagatttaactactgggagttgttaccttatggaaaatgaaaatcatgcgcctgtgatcgggccattgcatggatcgggtcattggtaagacgccttcataggcagtgaaaacgatgcctgcccagtatttctgatcccattattgcagatctgcgatacatttgagttttcacatgcaaagagctgccactcgatttcagatgtcggaattgctcagtgtaatagatgccattctctgaaaattacttttgatttcctgtctgtaggtgtgtacaaagtgacccctcgctcctgccaccggtttgagcaagcgttctacacctatgacacgtaagcctgggaattgaatgctttgtggtgtttgtatacattccgtggaggattcttcatttacttcagagaacaaaaggagtttttctgttttttttctgaaagaggcaaggttaggccttcaacagcatttctagataaggattttaagacacttggattagttactgaggaaccggagacaggatccctttcccaagaattctgtaaccccaggatagagggctgtgtttttgaagtgccttaaatagaagctttgtcaaatctcccagccctcaccgatgggcatctgtcaagttcaagtctgccatttttgtatttttacagatgtgtgtgggtttcactgggaattggaagcataaagttgtggagtggagaattagtttactctttaaaatacttctctggatctccagagttattttaccccagactaaaagcaattttctgtagtatatttagggtgaagaaggatgcccaaaaagggtattgctgatgatcttctgagaatgagtaggttctagcgtttcctctgctttgatttgtaggtcttcacctagtatcttgacattgacagccattcgccaccatgtccttggaactatcaccaccgacaaaatgatggatgtcactgtgactatcaagtaagatgagcgttctgcagtgggccgagagtggcgggagagggtgtggatgaggcctggggagtctctaataggctctctggaaattagttttgatttcttatctctagatgtatatacaaatggccttccctctcttataggacattgccgtcaattcccagcagccttgatcctttccttttctgattcagaaattacctgtgggtgaggaagagcgttgcgacagcttgtttcagtgtcttcaatttctgtttgaactctttgtacttctcatctttgctaaggaaaaaaaaaatctctggggtttgtgcattgtatttcaagtgttttagcaaattcaaattgcctatttttctttagacttttgcttgaaggcttgggaaatagagatggcacctggtataagagaagggtcgtgagagaggaagtatttgaaaggcaagtccctcaccgaaggtcacgttcatgtgaatgtcacctttcagggaatttttgcagtgtggtgaggtacctgtgacgccccaattttcttgagaaatgaaagagttttggcaacatgaccgtctctgtcaagtagaatgggcatcgcagtccctgtctccctcctgcccctggttgaagtcacctttccagctatgtttccatctttctgtccaccatctgtttatccatccgtcatccctgcagagtacatgatgactgaaaaactgagagtcttcagtgtttaggcactgggcttatgaggccacagcccctacacttatgggattgacagtctcatggggggaacagtggtcagatactcacatgcagaaccgtaaaatgacaactgttctgagtgctttgagcttgaccttgggggcatgcaggacaggtaggctgcggggggccaggccatgttaaggtccatagtctttgtcccatgatgcaattgacatgttttacatagaggaatgacatttttcttcctgaaggtccccctattggccgagtggagaacagacagaagaggcctgagagtgggaggtggtggaggcagggggaggcaatgggggccccagactagtggctgcggagatggagagcgacggactggtcggagagtcgttgagggactgagttgatgagacatggcactaaagtgaccactgggttagggcgggagaaatgtcagggctggccctggtttctggtgatggggagccaggtttttagctgggggtggatttgccgaaggtctgttgctgtcttttactatcatttactgtctccctgcttggaaagtatgaattactgataggactagcaatctaccttcttaccagtagtaactgcatattacctcctttcagcttgattacattcatttttgtaacttcacaagggtgtttgtgttgcttgcttgtgccggaggttgtatggaatgcatcttccagctagacagagccactcggattccccctgggaatcgtgtactcagcagacccaaaacccgactgctgacagttgccctccatgagcccctctgtggtcttttctgattcagatatggcagctcccgctttctccttgtttcttgattcttatttcccttgaaccctaggcccagccaattccccaacaaagccttggctttacaatcaaaatacacccgtcatctagtccctttttaccacttggccctcagccttggtctgacccccctctggggtcactgcagcagcttcccagctggccttcccttcttaccacgtggccctcagccctggtctgaccccctccgggatcactgcagcagcttcccagctgggctttgcttcttaccacgtggccctcagccctagtctgaccccctctgggatcattgcagcagcttcccagctggccttcccttctcaccacgtggccctcagccctggtctgacccccctctgggatcactgcagcagcttctcagctggccttcctgtttccgccattgctttgtgtattttccatgaaggagcaaacgatttcttttatcataccattcctcgactgaaaactccagtggctccaggtcggcaccaagcctgtgaagcctcagtctgacatctgctgccccttggacctctctgttggatatgactcttccgtgggcccctgtgccccaggctggactggtgttgccattgcttgaacatctgagtgagctttctctccaaggactttgcacttggcatcgctttgcccaagctactgtttacccagagagctgcgtggcgcattctctcccttccttcagacctttgctcaatgtcaccttatcagaaaggccttgactgtccctttaatgtaaaacagtgctccgggctctccgtcttcccacactgctttatttttctttattgcacttttcctctggtattatttttctctttattttcagccccttcccactgaaacgtggattccacaggggtaggaagtgtggtctgttttgttgatgctgtatccttggtgcctagttctctatcagagcagttctcagcgaaggtagaatggagaacagaggatggtggtgtggagaaaactccgtgtcctacatggaagctacaagcttatatccagtcgccataaaatcaaccgtatttcattccagcccagatctaccagatactgccaccatcactgcgaagctcagttgttattttttgtgaaactactagtttatttaaaacagaagactccgccactgtggtgtcatgataagatgtccagtttgtaactcgcaagtccatactcgtagaaaggtcaaattcccactgaccacaaggatacgcaaccacgtcctaggggccgccatttctttcttctaggtcttccatcgacagtgaacccgccttggtcttaggccctctgaagtctgtgcaggagctgcggagggagcagcagctggctgagatcgaggcccgcaggcaggagagggagaaaaacggcaaagaggaaggcgaagaaagaatgaccaagcctcccgtgcaggagatggtagatgagttacaaggccccttctcgtatgatttctcttactgggcgcggtaagctctcttgtgcgtttccctacagtgtcctctgttttgtggggacaggacccgccaaactgaagtatattaattattttaggtctggagagaaaatcactgttacaccgtcatctaaagagctgctcttttatcccccttcaatggaagccgttgtcagtggaggtaaatgtcaactcagcgagtgaatgtcacacacacctttgcagttgttcccttgcctgcatttacaagtagatttgtgatgttatagtgaagccatctttgtaagccaccttacatcctctctggcacacagatgttactgttggttggatggatggatggatggatggatggatggttgggttgggtggatggatggatggatggatggatggatggatggatgaatgatttagataaataaaagtaacttttgctgttagaattgagttgatctttttggaaaaggacttggttttctttgacattatcaggtcgacaccagaaggtagatgaagcacaaagctgccagtgatgatctttaatgatctttctgttgtttggcagagcatgatgggagggtctttttttggggaatggatgactgaagtgatcacttgtggagtatttgtcttttgccacttattatttttttcccagcactctggcttcgttaagttgtgggtgttatgtggttcgtgtttggaagcagagggtgttgaagagcgtgacttctagcaggcaggctgtttggggcagtctttctcagtgggtcctccagaggctgagcagcacggcctcctgtctgctgtaaagtgttccctcctgatctgtggcctcctgagaacctaggaagagtagtagtaaaaacccagccttcagcgttttttgattctcttgctaaagtccttcacactgagaaaggcctttcagggatggaaagaggcttgggctgtatccgattattgagctccccggggtgttaaataaccgcatttggaactagcttctaagatctgttttagccacttttgtcatgggaaacccccaaccaagaagctcctgtctctgctaccaagccccatccttgtgtttatttcttcccctcttagaaagctgcccagggaagctgatcgagatccacgggaaggcaggcctgtttttagaaggccagatccaccccgagttggaaggagtcgagattgtcatcagtgaaaagggggcaagttcaccgctgatcacagtctttactgatgacaaaggtgcctacaggtgagcccgggatagagacacatttgcctgggatcagcgtgggagtcctctgaagaaactggggcccacatttccttgggcttggtaaggcttcctgcagggtgtgaacaaagccgttgctagcattctgctctctcctcttcagtgttggccccctgcacagtgacctggagtacacggtgacctcacagaaggagggctatgttctgactgcggtggaaggaaccatcggagacttcaaggcctatgccctggcaggcgtaagctttgaggtaactaacactgtattttcaaaaggcagttatactgaggtataattaacatataataaactgcacaaaaagggtacagtgtggtagtcttgacctaggaatacacccatgaaaacacctccacaattaaaatagcacatctgtggccctcaaggtttcctcctgccccttggtaatccctccctgccacccttccgctgagctgatgatctgcttttcatcaccattggttagtttgcattttcgagtttttataggttggtgcaaaagtgattgtggtttttgccattgagaataatggcagaaaccgcaatcacttttgcaccaacctgtatataaatggaatcaaacgggatatactgttgttttttttttttttttggtctgacttctttcacgtagcataatttggagagctgttgactttagcatgtttgtgtaccttctgggaagtagttaaagctgtcatccataactgttccattttgaaggacacagaatgttcttactgaggcgtttgctgcctagctcccttccaccggtcctttctgggaagaagcgtgctgcgattgtacagagtgggtctggagattgttgagaatgaatatttataaactataggccaaaggaaaagagtgacagattacatcgcataaaaatttaaaattctatattgctgaatacatttggaaccaaactgaaagatattcaaactcggaagaaatgtttgtatcataaataatatccccattttacaaggagctcctaaaattggtaagaaaaagacaacccgctagaaaaaaaatgaacaaagattatgaaaaggaaattcatgcaagtaacacagtgactaataaacacagaaacacaaagcctctgtagttactgaggaaatgtgctaaggaagttacagtcgaaacactgttttgcagggattagatttgctgtaattaagacaatctttattttttggtaagtgtgggttttcccaagcataaataatttatgggactgtaagtggttacagccactttggaatgcaattagatagtatctttctgaatttaaagtgcatgtatccaacaattctacttctaggaatggattgttcaggaaataaaaataaaactaagtgcctagagatacatatttggggatattccaattgtctcttgtgtaccacaagagtaggtgctgtggtttgtcaaaccctgccttagaatgctatgcagtagttaagaaacaggcagatttctattggctggcagaagagaaccaggataaattgttgaggaagagagcaagttgcagaactgtacatataacatgccatttttatttcacctcctccacccactcaatgaacttgccagtctgtgaacaataatatgtaatgtttataaaatttgtgtgggcatagaaagagttctgggtggggcacggtggctcatgcctctaatcccagcactttgggaggcccaggcatgtggattgcttgagcccagtagtttgagatcagcctgggcaacgtggcaagacccgtctctataaaaaatacagaaatgtagttgggcatggtggtgtgcgcctatagtcccatctcctcaggaggttaaagctgaaggattgcttgagcttgggaggcgaaggttgtagtgagcccaggttgtgccactgcactccagcctgggtgacagagcaagaccctgtctcaaaaaaaaaaaaaaaaaaaaaaagttctagaaggctacacaccaaacttacaaaacttacaacagtagttacctgtggggaggaagattaggtcccctgtcctcctttgagtaacaataaaagaaaaaaaccttgaaaaaatgacctcttgacttgtggaactgttattttcatagttagtaggagtttaaccttgctctggtctcaccttctcatccccagataaaagctgaggatgaccagcccctcccgggagtcctcttatccctgagcggtggcctgtttcgttccaacctcttgacccaggacaacggaattctgacattctcaaacctggtgacgtgttctgcaatttaccacctgcctgtcttccctgagagagagccaggatgcagcatgcgagacttacgtgttgcttgacaacgtgagaagagaaggccaatgtggagtggtttcagtttcttgggggcccacggtcattagagtattgctcttactcgaacttaatgctgctgattcatgttcccttccacacgcacttcttgttttctgatcacccgcttgtcactaagacagtgtaattaatttccctggccacaacggctgctctcttaggcgtcttcttgttttgccacggaatcatgcttatgatgctgagtcttgtttggtggttagcttgcgtttcttctgaaaagacattccacttggtgggaagagagcagcagtttttctttcaagatgcagtcggaggccctgactggtggggattcaggaagtgtgtgttagttggtcatcttgtcagtcatggtgacaaagtggctgtggtggggctactggagaccgggcagcaggggcatctgaagacaccactttgcagtgatgcagactgctccttacttgctgtgtcctatcaggcaagttactttgcctctctgagcctcagtttctttattcattaaattcaaatatgagccaggtatggtggcccacgcctgtaatcccaccgctttgggagggtgaggcagtaggatcgcttgagcttgggagtttgagaccagcaacataggaagaccccatctctacaaaaaataaaaaaattagctgggcatggtggtgcatgcctgtggtcccaggtactcaggaggccgaggtgggagatttgcttgagcccagaaggttgagactacggtgtgctgtgatcgtgcactccatcctgggggacagagtcaggccctgtctcagaaaaaaaaaaaaaaaagaaaagaaaaattaaatatgacttctacctctctgagtcattgcaggcaggtgataccatcagctgccgttgttagagttgtgattgccattacctgactgtgagtggtgattatagagagagggttactatttctggctgccagggaagccatggcgctcccctggtgtaattctggtccatcgtgacattcgcccctcacttttaagccatgcctagatgtggctgctgaggctcagtgtgattatcttggcagagccctggccagtattacttcaaacccatgatgaaggagttccggtttgagccatcctcacagatgatcgaggtgcaggaaggccagaacctgaagatcaccatcacggggtaccgaaccgcttacaggtaagtgccctggccaccccactctcttccagggctgggctggtgaatcacattcaggcctctgttgcctggaaacgcatcccaggcttcacactgattttacttgggagggaagggagatgagatatgagggcaaaggagttttgactgctgcccttctctcctaggagctcaacctggtggttcagtctcaaatttcctattttggaattggcttgagagagccttttgagttgctaaaagcttttatttattttttattttttgagacggagtttcattcttcttgcccaggctggagtacaatggcgcagccttggctcactgcaacctctgcctcccgggttccagcaattctcttgtcctggcctcccaagtagctgggactgccaccatgcatggctaatttttctatttttagtagagacaagatttcactttgttggccaggttggtctcggactcctgatctcagatgatctgcctgcctcggtctcccaaagtgttgggattacaggcgtgagccactgcgcctggccacttttattttttaaaagagtttcaaacctgaattaaattattaaaaggagaaaatgtgctcagttgaataaaacttcaaaatgctgaaaagagtatagtgtaaaatttcccctctgtctcgtctcctagccacccaagttcctcttctgggagacaaccagtacttccagtttttctgaatgctcccagctgtagatagatagatacacatgagtgtctggcaaggcacagtggctcacacctataatcccagcacttttggaggctgaagtgggaagttctcttgagtctggaagttcaagaccagcctaggcaacatagcaagaccccgtctctacaaaaaaataaaaatacaaaataaaaaagatacacatctatagatagagagatgcatacatatatacatgtatacacacagatacacacatatgtgtattttttgtagacttatacagaatcactttagaggaagagtaattggaaagattgggtttagaaaaatggaccattttctactgaatatatggagtgaaagaggaagtgagttatttccatgttattgaaagctccattatttcaaataaagcctagaaagaataaaataaagctttagccttcttaaattacaattttccagagcatccctcaaaatgtatgagaaaagaaattgatggcagcttatccctccggcaggaaggtgtggtttgaaagtgggccggccacaccgagttgcctgggtcattgaggcacagttctcccctgaactattttgccccataattgttggtaaacgggaaacacttgggtccttcagataaccatgagaatatctcattcgtgcctgttcttgccatactagttgctatggcacagtgtcttccttaaacggagagcccgaacaaggggttgccatggaagcggtgggccagaacgactgcagcatttacggagaagacaccgtgacagacgaagagggcaagttcagattacgtggattgctggtgagacttggaatgtgttttctttggggacttttttttcatcctgtgtccagaagtatcttgtggtggccccaagactgctaggagtgggttgggcgagagggctgggggtggggctctggagccctcccagttcttacctttaattggtagagtttgccttttttctagccaacaggtcagatcaaggatctgtggcacaatggagttggaaaaccatgggtttggtagggcttttccctagcagtatgtggccatggcttacgccagggctcaagccaaacgcctatggagccagaagagcagtatgaacgggggagaggaggctgtgcgaaatgatagggagtggtgagggctgtggagtgggcacggcctgtggaaagggacagcctgtcacttggttccagcttattgtagccatgggagaagacagagtcagggttgccagatccttgaaattttaaaaagagaagtcagaaattcccacttcccagaaataatacccaacacaagcatttgggaatgcttatggtggacattccagatatccatcaatgtgtatatacgggtagaggggaggggtggatggagaggaaaaacatcttagaagagtaagagcacatagtatgcttggaattttgaaataagaaaccaaatttgatttattttggggtaggagaaaatgaaactgagttgggatggaaggagtcgcaaaatttcagatgtttcaacactaggggtgttcttaaaggaactctggactcttaaggttaacaggccacagattaggaaatgaggggagagaaatgctcctgtcttaatgatctcgtgcagccaaaccaggcttggaccaggcacgatacgacaagccccctttctagagaactgactcctgagtttttttgcagccgggatgtgtgtaccacgttcagctcaaggcagaaggcaacgaccacattgagcgggcgctcccccaccatagggtgattgaggtaaggcattcagtgctgccgctgcacctgggtgtgggtgcctccctaatcagaagtcctcccgtctcctctggctgtctgcctttcatctgtggcggggggaactttcatcctaattaagggtcctcttagaatagtgtcatcttcacaagcagaatcttatgtgggtttttagtgaacagcgttgctgtcatgcatccagaaaggaaattggaactgttgtatcctccccgcgacttgccctgtaagctctgatcattattctgcaagttaaggaacttaaggcctaagcagcatttcaaatcaagggacaataatagaacatgggcttaatgggtggcagggccacgcagttatcttaggttcagatgacctttttcctgctcccattttgtgggcagagtcttttgatactcaagatcatgacctagctaaattaatccctaaagaggacatccttcgagtcacagaatgtggcctgggaatcatttgaagtaaggcttttctcttactgagtaactctcattgggaagactagagggcttaggtagggcaagaggggctgcctcttagtggctttatttaggtggcttcattatgcatgaagattgtgagggaggatagaacttttgacctaggaagtggattttcttttttttttctttttttttttttttgagacggagtctcaccctgtcacgcaggatggagtgcagtgccgtgatctcggctcactgcaacctcctccttgtgggttcaagtgattttcccacctcagcctgtagctgggactacaggcacacaccatcacacccgactaatttttgtatttttagtagagacggggtttcaccatgttggccagattggtcttgaactcctgacctcaggtgatctgctcgcttcggcctcccaaagtgctgggattacaggcatgagccaccgcaccgggccggaagtggatttccttgacgtctttacggtgttggcattttaaatggctgggatgactgcatctcacaccaaaatgctttgcatgttctcggtgtagtaacttaggccaggatcactagcataatgtggactgtggccgggcaggtatgaaagggaagggggccggccctctgggatctcgcaaactccatgtacagacctcacgcagagggggtgctgtgactctgcccctgctctaacaggcaagagcatccttctcctctttttttttaagagaagctggaaaatctggcttcatatatgaaatttcttaatttttaacatgttggcaagtaattcaaacgtagaaaaaaaatactgtgctttcgaaatgaaatgtgtctatgggccagggatatgcccctgctctaacaggcaagagcatccttctcctttttttttaagagaagctggaaaatctggcttcatatatgaaatttcctaatttttaacatgttggcaagtaattcaaacgtagaaaaaaaatactgtgcttttgaaatgaaatgtgtctatgggccagggatagccatcttctgtcagtttgtgaccttggacgtagggtactcaatgacaaacttcgcttccttaatgtaagaagcaaagtttgccatgaagcagctctcaggccatcggacagctggcatagaagttcctccaccagctttctcatcactggcattccctctttctctctctaggttgggaataatgacatcgatgatgtaaacatcatagttttccggcagattaatcaatttgatttaagtggaaatgtgatcacttcctctgaataccttcctacgttatgggtaagtccagacttttaagctccaagtattgtgttccctttggctttgagacaagtacgaatgggatgtttttggttttgtgcctgtctcgtgccttaggtgtgacaggtggaggtgctccagagtgccgcctgctgagggttgaggttgagatttaagaaccttggaccacaacacgtatttgggagagtgattgccagttgtgggagagaatgtggtccagtttcagataactgtctgccatcagttaatcttccaaagaattatagtagaagcctgatcaatgatcaatacaatatggaatctaacgtggaaagccaattctaaagaaagcgccttgtaacttaaaattttctctggagtggaggtcgtattaaacgttcttgcattggtttaaagaaatgcctgaggctagataatttataacaaaagaggtttcattggctcctcgttctgtaggttgtacaggaagcatagtggcgtctgcttctggggaggcctcaggaggcttccaatcatggcagaaggtgaagtgggagcaggcatgtcatgtgggagaagctggagcaaaagagagagttggggcatggtgccacacacttttaaatgatcagatctcacaagactcataacgaagacagcaccaagccatgagggatccaccccaaagatccgatcatctcccaccaggccctacctccggcacgggggattacaattcaacatgagatttgggcagggacaaatatccaaacagtatcagaggtggtggacggtgggctggagagcaggtggtctgggctttctcttgtctccagtagtgactcaccttgctgcctgggtcagtcacttcatttccacatgcctcaacttcgtcctctgcaaaacctagattttggactcagagacctcttataatcttgttcagctctaacaaaatctccatgttaccattaatgaagaaatgtttataaaataccctgcagaccctctgcggatgttagtgatttgctctgggggtacattgttaagatgcacttgtaattttataagcagttaagtatttggcatgggtgagaaagtgtgtgtgcgctttagtccactctgtccagggcttgcaggcgtgtgcttgtagggaccaggcaggtaatgtcagagagtgcagagggttgggtagggtggggggcaaactggggaactcctgccccatccatgaggggcacaagggaggggaagaggcagagaggaggggagggcgccactctcttgctcctgagtgttgctgtgctagaattgaggctcagggttggtgtcacttcccagttttccggagaagctggaaattagaattatttgaaatcacctgatttttaaatatagtcggtgaattcagatttacttaagatgttatagaagaaaaaagaacacataagggatcttcaatgcgacccataaccttcagtctgtgactttcattttaggaaaattccccttgtgtgttatgtagaaaggtgccagtgtgggcccagggaggtggtcctggcattctcttgcggcaggtgcactgtggcatcctcacagcctttgccatcagccagggctgcaccttaaccctgctcatgccccatcccgtgtgggagtgagaacaggcaagaaccccagaaataaagccagaaacaaagtactccagtgcctcctgaagcagcgtggagagccacgtacatgatggaatgcgttttgagtttaacagattggtggagttaaggtgacatcatatgatgaggcagtgcaaggcgggaaggaccctcaggagtcgtcagggggttgagtcccaggctctaccatgtgtaagttgtgtgaccttaggtgactttggctctctgggtctccatagggataataacaatacctgttttgtagtcaggattggcgataatgtagataaaatatctggcgcctgcctggcatattacagatgttcaacacgtgttagaagctatttttaatattactattatattaacttatattactattttgagcaagaacatgggtagtcagaatctgatttgaatcttaatttctgtgcatgatacataactggatggagtctcagatgacagagggatgtgtgatgtctatggagggagctttctttttcaaatatccatgtttccaaagacacccacccagagagcggctgtcctgaggatgtctgctatgaaatattgattgtgtttcagtttcaaagcatgtctgactttgtttctccctccaggtcaagctttacaaaagcgaaaacctcgacaatccaatccagacagtttcccttggccagtccctgttcttccatttccccccactgctcagagatggcgaggtaatgcctgtggccggattctaccttctgcctttgttttaataattctgctgtttagtttaaggaagcacagttctctccttttctccctaaataccactctgcagaaatgcgctctctgaatcaaaagaggttgggttctgtagggattattttttcttcattgtttttctgtttacaaaaagaatacatattcatggcaggagattttgggaaaaagaagacataagcccatcatccagaaatagccactgctaacacggtgattggtatcctttgggtcttttttcaggcacgtgtgcgcatgcatgtataaatataaatagacatttattttaataattcaaaactgacactgttttgtacattgttttgtaatccatgcttttcaatgaagaatttatcacaaatctgttcctcatcatcaaatctttctttttttttttttttttgagacggagtctcgccttgtcgcccaggctggagtgcagtggcgcaatctgggctcactgcaagctccgcctcctgggttcacaccattctcctgcctcagcctccgaagtagctgggactacaggcgtgcgccaccacacccggctaattttttttttttgtatttttagtagagacggggtttcaccatgttagccaggatggtcttgatctcctgacctcgtgatccacctgcctcggcctcccaaagtgctgagattacaggcgtgagcccccgtgcctggccaaatctttcatactatgatttttatggacagtagtccataaactaggaaacgccatgatttatttaaccaaggcctactgttgggcatgatcgactcttgcactttgaacatatcaccccatgctttcctgctaagaagtccacttttaaaaatgccttgtaatttttaaaaattcctctattttaacattccgctattgagtttagggaaatacagtttcctcatgatgggggatcccttgaatgagatgagttgcttttctcttgctgctttgaacgttctctctgtctttgataatctgattataacgtgtgtcgtgtagaacacttgcagctccaccttttcagtgtcctttgggttccatgaatctggatgtctccctccttggaactgggaagttttcagccattattctggccgtcatttactgattataaagtgcttattatcaattctatttggacagagctaacttgtagttggtgtggggagtgcaaactttgcaaagaatttggttcttttctggtggtcttagcctgaggatgtcaagtgtgagcctagagggtgacgtttcctctcctggctccttaccacctgccgtgaagatgatctactctggcctttctctgtggaaaatggctgcgaaataatgaaacaggctgtcacggaattttctcctcctctttctccaggggtgttgaaatagtcacttcctacagcgatggggaaacatcttgggctttggggtcacacttcccctgagttcagagccttcatagatgtgtggcagccttcttagctgagtgaccttgggcaagttactcttagtctcttcgtgtttgactttcctcgtctataagacggggtgatgatcccgaccttgccagtggtagaaagcaaagcagccgcgggcctcatgcaatgtgcatggtgcctggcagctggtcggtgctcagcacacagagctgtgacgggcctcatgcaatgtgcatggtgcctggcagctggtcggtgctcagcacacagagctgtggctgcccctggtgccgttccagggatgctgtatttttaggatttgccagcttacgagcctctcaagcatcgtcccttagaagtcagccccgttgtggatcctcagttgtatcacgtacctcccttatcagaattggctcataataattttttgtgtttcataaagtcagatcctcagaggaccgtaattgtcaaggttgggtactcataaaaaggctgcaggctctgacagccttatcagaagccacagtctcagagacactggggacacatgcccgccactgatggaatagcccgctgaggttgatactttgaaggcagcaaccttggtttggatgtgtagtcttggggatttctttaaaaacataaagttctttacatcacagccatacgttaggttttagttttcatttgctttgccagagctgtccttataaaaataacttcttcccatgtgtgcacagaactatgttgtgcttctggactccacactccccagatcccagtatgactacatcttgcctcaagtttctttcaccgcagtgggctaccataaacacttcaccttgatttttaatcccacggtaagtaaaagagggagttaaaaaaaaatccatgggctgggtttggtggctcacgcctgtaatcccagcactttgggaggccaaggctggtggatctcttgagcccgggagtttcagaccagcctaggcaatacggtaaaaccccaactctacaaaaaatacaaaaattaaccgggcgtggtggaacgcacctatagtcccggctactcgggaggctgaggtgggaggatcacttgagcctgggaggttgaggcctcgatgagccatgatcatgcccctgcactccagcttgggtaacagagtgagaccctttctccagaagaaaaacaaaacaaaacaaaacaaaacaaaacaaaacaatccatggggtggcgaaagaaggcatgtccatacaacctgtgctccaggtcgcaggttgcagggcagatatttaaagggctcctggcattgggtcactttctcattctgccttctggattctgggcttccccagattgtttttagcttttctgagcactgatgcctgcgattccctttgaggaggaaactggtaataagagcagtgtaattgtttagatcggtggctcaggaatgattttgggggaggagggacaccactatcgctggtgtggcgtgtgcttctccatgagggagcacatggtacatggccacgcaaacccctagaaccaactgctactttacaggaaatagggaggacccaggagcacgcaaatgactccacagggatgcaggacaaccacctggagcctgatttgtttgacaaataaattgcaaggaaaaaaaaaccaacaacagatggacagaatacctgtgggttaaaagaaacttaacttatcgcttaattcattgcaatatgtggcccttactatttgcaatatgtgtatctgttgcatacggtctgtcctgtatccgataggctggaacagtggaacaaacaaaacatacacgtatcttttaccttcttgataaaattgtttagtgattcctaaagctcagatgcagtattgtcacctgatgattaaacagacacatcagcaatagcaaaaacagagtccagggctcagcctcaggactgctgattctgaacttgacggggtgaaagtgtagcacaggagtctgcattaaaaacaaaaatctggcctcatagctactgtgttggttcttgcttctaggccttttcagtgggcagaataagaactttattgttttcaaaaaatgtaactgtaagtggaacaatatcttccgatcctcctttttccttttttgataacgacacagcattcctctgtgtggatataccgtgtgtcttaggccatttgggctgctattttgtatcttagactgggtaacttataaacaacaaacatttatttcttacagtactagaggctgggaagtccaagatcaaggcattggcagatttggggtctggcgaggacttgctgtctgcttcatagatggtgccacctagctgtgtccccacaaggcggaaaggggcaaacaagttccctcaggccactcttacggggcattaatccctgacttaatcacctcctaaaaagggtgtcctcttgacactatcacattatggattagggttcaacctatgaattatgtaggcacagacacattcagatcctggcactacatgtaggatattcagttagcccctggttgaggggcgtttgtgttgttactggttttctgctattacacataaccctttaatgaattgccttacgcatgcatgtttttgagtgttcgtcagtctctctttggaatagactcccagaagtggaattgctgagtcaaagggtaaatgcatatggaattttgattgatacggccacttcccatccatgggggttttactgttttatattcccgccagcagtgaatgagtacccttttttccccaacagagtattttgtcaaatttttcaatttttgcaggcttatagatgagaagtgatattatctcagtgtacttctaattgcatttctctcttttcatgtggttaagagccatttgtatttgctgtgaactatttaacctatttttctatagaatttttggtctttttcaaccattttcagctctttgtatactaggaatattaaccctttgtaatgtttgttgtacatatttttcccaatttgtcatttatcttttcacttggtttctgcaaagatttactttatttctgtgttaaatgtgttgattttttcttattgcttctggattttagagtcataggaaggttttcttcattcccagcttttacaggaatttatcgtgtttttttcaggcagacttttatagtttctgtttttacatttaaatctctctatccatttggagtttttcctggtatagatgtgaagtatggctccagattgtctttttccacatgctatccagttaccatttcatgcttttcaaacgccatcctgcatggaaggtggacaggaattacctttcatttagagatgagaagatgggaacctagaaggagatgtgagcagcccaaggtcaccagctcacgtggagcagtgctagggcttgagcagagctctgctgctgattctgggcttctgtgaagagtgattcatgctcagtgagcctgtaaatatgatcttacctgaacaagagagtttttctcatgacccacgaggaaacacttccttgttactcacagtagagacctggttagaaagtgctggagagggctaggtgtggtggctcacgcctgtaatcccagcattttaggaggctgaggtgggcagatcatttgaggtcaggagttcgagaccagcctgggcaatgtggtgaaagtgaaaacccatctctgctaacaatacaaacattagccaggcgtggtagcacgcacctgtaatcccagctactcgagaggctgtggcaggagaattgtgaacctgggatgcagagtttgtagtgagctaagatagccccagtgcactccagcctgggcgacagagcaagactgtctcaaaaaaaaaaaaaaaaaagaaagtgccagaaagataagcatatacaagaaccacttacctttgcttggggctgcattgtggcccagttgctgggagaggcttctgtgaaggccgttgatagctgcaggcagtgacattctcaggggcccctagcagacaactcatccgggctcagggacacacctgggagccagtggcaggaatgtggagacactgcttggtggtggccgagcagcccagcctcgtagctgctgcctgtcacttctgagaatgtaagaaactgtgccctggtgtgtgatgttccccttcctgtatacctatgtaaccaacctgcacattgtgcacatatatcctaaaacttaaagtataattaaaaaaaaaaaaaaaaaagctgtgcctgctggggcttggattcccgaacagggccaagtgttgaatgaagagagcgcccactctgtgccaccccgtacagggccctcacaggttgatcctcacaacaagccttcaagcaggtgtgccattcctcccattttcacagaagcccagaaagattgagtcacttactgagtgttagcagaaccaggactcaagtgaggcggtttgtctcaagccacatggtttccacctcgttctgccctccgcgtgatgagtggctcagcattgcatgttcacgggggctttgtaagcacattggtttccttctttgttgatgtgactgcccacagcctcgcgactggattttactcagtattccatgccctgctgagcatttcacatactcctttcatcaagtttcacagcatccacccccagtgggtgttgttcatatgatctccatgtcatagttgagtaaactgagtctcaacgtggttgcctgagtttacccagtgaggcctgggacctgagcctagactgaatcactcttaattcctgctgaattaaacttttatttatttattcattattatttttttctgagacagagtcttgctttgttgcccctgctggagtgcagtggcacgatcttggcccactgcaacctctgcctcccgggttcaagtgattctcacctcctgagtagctggaattacaggcatgcaccaccacttctggctaattttgtatttttatagagacggggtttcaccatgctggccaggctgttctcaaactcctgacctcaggtgatctgcccacctcagcctcccaaagtgctgggattacaggcgtgagccactgcacctggcctgaattaaacttttaagtaagtgtttacttcagtggaaaaatgggttgggttctaagagatgtccaaagatacaggagtaggcagttgttgatggaaatctgttcctgcccttattctttcatttatgaaagggcatcccaggtacagcggcgcccacagtcactctctagcccagcagttcttggatgggttggttgcaggacccctttatactgttaaaaattattgaggattttaaagagtttgagtttgcatggattatctctgtgtatatttatcatattagtaattaaaaccgagatgttgaaaacgcaagaactcacaagctacacattccgttagctgtgggcgtgatgacatcagggtgcgtagtctctggaaaagtccactgtgcgcttgcgaatgaaagagggcggaaaaggcacatcacatcttactattggctgaaaatagctgtggcctcgggaacctctgcgagaggagtcccggtatcctacactgagaacactgctctggctcattaacttgtttttatcattattgggaagttctccttccatttatttgcttcctttatgagagtagagtgggccaatgggatataggttcacttgatgctttagaacccagcatttcaggggctttagcaagatggaaatgtctgtctcatgtcaagtgtccaggagtgaccagtgcagagatagtctggtagctccaaggcgtcaggggacccaggccccttctgtctcattgcgctgttccagtgcattgcttttctccaaaatggggcaattggccaaatgctgtctgcccagcaaaagggagggcacaccacttccctagggtccagccagggtgtggcacttaccgcttctgttcctgtaccattggccaaaatttagttccagggctgcgcctgctgcagggaaggctggaaaaggtgatctatattgtcggtggcccagataaaagttgggggttctattgggagaaagggagaatggccacagggatgctagtagcagtgcctgctttgcttcctcactagaccgtactggctgggaatagctgcccatcactgtgtgccctgggtctagaactgtaggttcttgatacatccttgtaggactaagtccctgcatgttgctgggactcaacaaactgagacccagttgcttttcaaccaccaagactctctgatagctgcatctcttcatttcctcagttgggaggagggtccagaggctgaggaatgccttgtcattggaatctctttgtccctgagtttcagaagcaaatagtgaagctttgggtagaagaggattcatgggaaaatatatccaaatcactttggttccttcctttggatagaaggaatttggatcatgagggcccctgggtgtcctcaagtggccactttggaaggctgggagggaggtggctgtggcattgtggatgatggacaagctt

SEQ ID NO: 662 - DNA, 96960 bp, Homo sapiens
ttctgaatttttatggaaaggaaaaggggccaggcgtggtggctcatgtctgtagtcccagcactttgggaggcccaggcaggtggatcacctgtggtcaggagttcgagaccagcctggccaacatggcgaaaccccgtatctactaaaaataccccagattagctgggcatggtgccgcatgcctgtaatcccagctgcttgggagggtgaggcaggagaatcgcttgaaccagggaggcagaggctagagtgagccgagatcatgccactgcactccagcctgggctacagagcgagaccgtcttaaaaaaaaaaaaaagcaaaaacaagaactaaaacaataaataaagtgggagtaatccctctacatgatgttaatagttaccgtacagctactattgtcaccacaatgtggtactggtggaggaataaacacagtgatcaatgggacaaaacagtgaatgagaaacagatgcgcaggttaggtgtggtggctcacgtctgtaatctcagcactttgggaggttgaggtgggtgaatcatttgagcccaggagtttgagacccgcctggccaacatggcaaaaccccatctctactaaaatacaaaaattagatgagcacggtggtgcacagctgtaatcccagctacttgggaggctgaggcacaagaatcacttgaacctgggaggcagagtttgcagtgaactgagatcgcgccactgcacttcagtctgggtgacagagcgagactctgtctcaattaaaaaaaaagaaaaagaaaaagaaaaaaaagagatgcacagaaatctgctcaactgatttttgacaattgtgaaaaagtaaccccatagagggaaagtaacctttccaaaaatggtgttggaaaaatcacacagccacaggccacagaaagtgaactatgacctaaactttacatcttatgcaaaaaattaagacaaaaaattaacacaaaatgtatcataaacttaaatgtaaagcattgaaccatataactttttttttttttttttgagactgagtcttgctctgttgccaggctggagtgcaatggcgcaatcttggctcactgcaacctctgcctcccgggttcaagcgattttgctgcctcagcctcccgagtagctgggactacaggtgcccaccaccatgcctggctaatttttgtatttttagtagagatgaggtttcaccatgttggccaggatggtcttgatctcctgacctcgtgatccacccacctcggcctcccaaagtgctgggattataggcgtgagccaccgcacccagccttaaaccatataacttttagaaaaaacaccagcgacaaagtgtgcttggagaataattttcagacttacagtaaaagcacaatctataaaagaaaaatggataaattggcctcactgaaataaaaaaaaagttttctctactatagaccctgcaaggaggaaaagacaagctacacatagtaacaacagaataccagcagggagcctcctggtgctagaacagatctgtacatattgtgctgatagtcatgcaattatacacatgggtacatttgcataatgctacacacacacatatacacccacacaaatgagggcatgtaaagcaggaactctgaataagttctgtggattgtgtcaatggcaattttctgttactagagtgacagaaatacactgtatctacagttaaataagacatcaccattgggggaaataggacgaagtataaagcactttcctgtccattttctgggcaagtttccatgaatatataatcatttaagaataaaaatttgattaatacatttgaaaatataggcctaccatctggtttgtgaagacagagtaacattctttcactaacactgttttgatcatgtcgggatccatgatgaccagcatgggctgttgcccctcatacagcctgtgtgggggaaaacagagctgactaaacctcgcttgcctgattctgcagctggaaccacaccaaagaatccagattttgatcctgacattccatcatccatacttgcagttgtgcaatacacagcaaagccagctccaaggtcaattagggtatgacacagagtaagattctcaccacggaagccacttaagccttcatacaacgaagggtgatgtggctcaaacaggaaagagtcattgaaagacaaaagagctcttcaaagagatcatggttagaaatatcagaagcctttgttacatctaggtggtgtatacttgggcattccctataccattctccataatcttttgtatgtttaaaatatttcattataggctgggtgcagtggctcacacttgtaattccagcactttggggaggccgaggtgggtggatcacttgaggtcaggagttcgagacaagcctggccaacatggtgaaaccccatctctactaaaaatacaaaaattagctgggcgtggtggctcacacctgtaatcccagctacttgggaagccagggcaggagaatcacttgaacccgggaggtggaggttgcagtgagccaagatcgcatcactgcactccagcctgggcaatacagcgacactccatctcaaaataaaaaaaaataaaataaacagttatgtaatcctcttcattattttctttaaaaatactgtcttcttttatcttcttgttaaccaaaaagtgacagagactggagccttgattaatagtttcctttagccaaagtttgagaatacatctgggaagaacaccagccacaggagcctctgtgacctgtgctttttctaaagagggttttgggaacttcagaatttaaaggagaaagagcaagcaggagagagaagaaggagagtgtgtaggtagtgaggcaaatggtcacattcttgtgaggctctgagaagtgctcagcaaatctgcattttgcatgtgaaaagagggcatagaggaaaaagtcagttatatatttctattgtgataaagaaatctccattttacataagataatgcaaacatatgaaaagagagaatagaggcaaagtcgattacgcattcaacttggattgggtggagggataatttcttggtcttgtccttgtcctgtgcctgccaaggtaaactggaaattgacattgtcagggtaagtgagattcaacagaacttggttttaagggctggttcatggggggaaggaggatatgtatactaaaagatttagggactcataaggaacgtccttgtgagaaacttacgagggacgccatctggggagatatgtggccttctatcattttgggaatctggctttcttatgaggttatgacacagcattgtgaaattacagctatatgatttgaactaaaggaaggcagtattgcatgactcagtttccaaccataacttttcattttggcatagtgagtttggtcagatttttgctcttaatttagtcaagataactttttttttcataaaggaccacagtatgttttattacgtaaaaagtgttaaaacttttgtatgaaaagataccgtaaacaaagttaaaagacaggaaagagactaagagaagatatttgtacaagagttaatatagagaatctataaaacttctataaatgaaggatttacttgataagtgagaaaaggatattaataagcaattcataggaaatgaagtctgaattatcagtaatatgaatgagtaattgacaatgataagcatgggaagttcctcagtattggtagaagtcaggaaaatgcaaactaaaaagatgccatttttattaaaatggcaaaaattacatttaaaagcatagattggcaaagatggagggaaaggatacttttttatatagctagggagactgtaaattaacaagtttcctttgcagagttagtttggcagaaaatgggcatagaaaaagaagataacttttaaggatagacatgaccattttataagtcctttaaaaaatttgatcttttaattaattgtttagaataaaaggtcactaaaattttaaatttagaagtcttaattcaaaggctcccactattttgtcattgacaattagaatttctaatgaagtatttattataacagcacatagagagagagaggctgggaaggtggccttgttatgcaaagaaaacctcgtaggtagtagccctcagagtatgtgtcagatccttttctactcttccctagatttagacaagggaagttctggtaaggccacattaaaatgtgtcaaagttgggaggctgaggtggcaggatcactgggaggcagaggctacagtgagccaagatggtgccactgcaccaacctgggtaacagagtgagactccatctcaattaaaaaaaatgtgtaggccgggtgcagtggctcatgcctgtaataccagcactttgggaggccaaggcgggcagatcacctgaggtcaggagtttgagaccagctggcaaacatggggaaaccctgtctctactaaaaatacaaaaattagctgggcatggtagtgagtgcctataatcccagctactcaggaggctgaggcaggggaattgcttgaccctgggaggtggaagttttagtaagccgagatcaccccattgcactccagcctgggtgacaagagcaagactccatctcaaaaaaagaaaagtgtcaaagaaatatattttgagttgcatattgatttctcttaactggctggggtttctagaggggaaaattgacattttgtagctgtgggcattccagtaaacattagagggggccacgaattggtaaaacttagtggaaggtagattgaaactcaaaacagaaagttatcacacaatttacatagggtcaagatctccaagcataaggggaagttatagctagctgacaataaaccttgaccctcagctaccaaattccaaaatgaaaagccacatcggctccttatgtggagacggatctcaagctaaaaactgttcatcattatggaagcagaaaactcaccttccttgttggaagtaagtaaaaactcccagaaaggagctctatggcagaagaaaattcaggtctcaagcaacattttatgggagatcaaggatctctagaaggagaagctcccagacctcagcacatgagccaattggttagagtgataaaaagctctagctggttctatcacactgatgggaaaatttctgcaggctgagggccaaactgccctcagtgaatcccattgtggttaccaaggtgttaaccaaaaagtgactgaggcaggtgtcttgattgatagaggtttattgagtcaaagcttgaggggacacctggaaacacatgagccacaggggtagctgcgacctgtgtttttccaaagagggttttgggaacttccgaatttaaagaggaaagaaccagcaggaaggaaaaaaggggggaaagagtaggcagtgtggcaaatgattacatttgtgtaaggcaccaattagctctcatcgaacctgcactttacatgtgaaaagacagagtagaggaaaaaatcaattatgcattcatgttgtactcagaaaatctacattttacatgagatatacatgtgaaaagaaagagtagaggaaaagtcagttacatattcatctcaaggtaggtggagggatgatttctggtcttgtccttattctgtacctgtgataagctggtaatttacatgatcaaggtgtgagtcaacagaactcaatgacagggctggtttatagggcagatgtatagaattccatgtgagcaacttgtgagggaaaccatccagaaagatatgtagccttctattgatataggagccagaaaaaaattatttaggcagatagtgagggcaaaggggtcctcagcaaagcttcccttttaacaaaaagcagccccccaaatcatttcttttctaacaaagagcagcctgaaaaaatcaagctgcagacatcgataagcaagctggaagcttgcacgggtaaatgctggcagctgtgccaatagaaaagggctaccttggaagctggttatgttcaacatggaggccccatcttcccttatctttgtcaccccatttacagtaaaaaaagcaggcaacatggtgccagccaggaagagaaccatctgcataataaaagattagggtggggcagccaacttcttcacatgttatgcaaacagtacacctagtcctaaccagttttttatgtgctatgcaaatgacacacctggtccaaccaatctttcatgccctatgtaaatcagacactgcctcctcaagctcatctataaaacctcctgcactttaccgcaggtcagaagacccactgggggccccctctctcggcaggagagagcttttctctttctttcacctatccaacctctgctcttaaccttattctttgtgcgtccactatagggagaccccctatatctgtgggacaacaaacctcgggtattaccccagacgagtgatgccacattgctattgttgtgggaatgtggcttatgtatgaagctattacccagggttgtgaaattacagctatctgtctggggaaaaaaggaaggcagtaaggtatgacttaattctcaagctcgattttccctttgtcatagtgagtttagggtctcaaagattttatttttgttcacatactgaatatgcatggagtttcctatgacacgcatattccccttgcaatgctcaattcccagatcatctttttcttttagatagcctctctctgtttgttacttaggttgacaatagcattatccaaacaaaatctgggctgagattgttctctctgcagtaaaataactcagcatagcaacagctctatccaatgcaagtttccagaatactcacccccacatttctccgtatttttcattacattctctgtcaaaattccaaagaccctggcagaagaaacaaaatacaattcaagtattatttcgaatgtactgaacgctacatttaaccagggcaaaaaagtcaaatccaatgacttgctaccattaggcttgctaccatttactggcagttagagggaatcttttttttttcctttttttctgctgcccaggctggagtgcaatggtgcgatcttggctcattgcaacctctgccttctgggttcaagctcttctcctgcctcagcctcccaagtagctgggattatgggggcccgccaccacacccagctaatttttgtatatttagtagaaatagggtttcaccatgttggcaaagctggtctcgaactcctgaccttaggtgatcctcctgcttcagcctcccaaagtgctgggattacaggcgtgagccaccacgcccagctgggaatcttattcagagacctcttaaggaaaaggagagaaaatacagaagatatttgaaatggagaatttaaagtcacttttaaattttctctaactagtgtagatattgaatgacttacttttgtctatgaacactaagcaactcattgtctttctgatgtgttttcatttctgcatatgttgtctctgcaatctcataaacccctgaattatcaccaccatgggaacatgaagaaaccgaggctgacggaaagtgagtgagtgtctcaagggaatgtgcaatcttttatctccttgttcagcatccttttcatttatctcatgtattctctctagaattctagctgaattagaaagtcaaaaacatcagggaccacttttagtctagcagatttaaataaaagtccaaggcattttgttgagcgagaaaatgagtgagtgggcaaatgacagagtggactcactttccagttttccagcttaacacataataagtgtgggaaatgccacctctagatgtcagacacagcacattacaatactcactcagagttttcacttctgacacttaaaaacaaactttcctgcttccttgtttcagttttgatgttctaactaggcaacatatagcccaggacatgtggatttactaaaggatcgatctgggaaatatgaagagaaaattattgctttttcggggggtaaaaaaggatgaaattcttaagtggtaattttgcaatgaaggcctcagttgggagaattagaatctgaaaaacaagcctcaggtctgtaagacagaaaacctgagtcagagagcaacctgtacacaggctttcttactggccatgtggacacgcacttgtgactttccatcatggccccaggcccttggtggagcatcagaccagggtagccacaaggctcagtcaaaattcgaagactatgagacacatattacctcctgtttagataattaaattttgaataagtttgtcaaattatcccctttctagttattttgttaagtaattttgcctttcttttaaaaaaaaacagaactcattttgtggttaaatatctgaagttgatggacagcctccatattgtcttcattataagcactccctgctcaggctcactcatagggtgctgcctttgaagaaaagcagcaggaaagcagaaccttcttgttcttcctctcaaatctgtaaaatacatcctggggagaagaagctggagcacaactgtggaactacctgcagggaatttaacagttcttgagagaattcaagtatgtgcaaattatccagcggtaaatagctgcctagtgaactgaattttctttttctttttttcttttctttttttttttttttttgagacacagtctcgctctttcacccaagccagagtgcagtggcgctatctcggctcactgcaagctccgcctcccgggttcacgccattctcctgcctcagcctcccgagtagctgggactacaggcgcccgccactgcgcccggctaattttttttttttttttttttgtatttttagtagagacagggtttcaccgtgttagccaggatggtctcgatctcctgacctcgtgatccgcccgtctcggcctcccaaagtgctgggattacaggcgtgagccaccgcgcccagccaatgaactgaattttcaaagctctacaggaggaaggaaacaaaagcttactaaagctcttggtgaaaacaggaaagtttgaatgtggtacatgatgctaatgagcgctactggggctcccatttccccatttctgcttttctcttaatactaaggacaactgtagcttctcaaaaatctgcacagggcaaaaggaaagtcctctttatggttcgcaaagtctgaacatcaagtcctgaacatcgagtgctgatcccccagatatctgtgccgtgcaactgaggcaaacccaaaccccctgaccattaagatgagagtcctggtataaacctggccctgctctgggtggagcatacacaccatttctgaaagtgtaaaacattggaaattcctcctgaggaggagcatttttactgataggactaagcttgggtttgcatcgataagaagcaaaagagggagctcaaataacacttaccctaaggtagaacaaaatagttcccagaaaaggcagaggggttggcccaggaattcccagcttcttaaaaagtttatgtgaatgggtcccataactataaaataaaagagaaagccaggttacagaaattgtaactttatagataaggggttggccagacattacctcaggaactggaatgttcaagggagggaggtaacatggaggcaataaataacaacagaaactctgatggcaataattacattttatagcaggattttaaggaatcagagagaccaatggggttcaggaggatatttattaattatttaggtacactgggccagtcagattaacatccaaaggactgagcctcactttcttccaagcctgacttttcgggtgctcctgactctgcttcctgccttattctgaccaaagacagatatactggcacacatggggatggacattccctttcctcaggtggggcctgaataattgatttcggctgatctttggggattcctgcaagctctgctctagttacatctcggaagctgactagtctatgcacagccgaagctaagagtaccatctctggataagtaaatgtggatacaatttacaagcctagttataattctgtcagtactgattgttctgttgttacgttattactgcaaatgctgcaaatgtctatgcccagaggaaggtttgccattcccacgtgtagtgtaagcatgtttctattacatacgctaatgttgttaccatttctgcctacactaaaaggggagaaatctctagaaggatgcccacactgtgtacacactacctgggtaaggaataccatagtcaaaactctactgtaccataactactatgaatgtgcaggaaccaagttagaaacctgcacatacaaccagaccacctattcagtctgtgacccaggaaataatcagctatatgtatgttatgaccctaagctctcaccctatgaattctggcttgaggtacatgttaaatcagagggagaaaaagaaggagagcttatagctcaaaccaaagaagcccttcccctctataacaggcctatttccttgtattttgatgcctaccataccgcatatgttcataatcctaaaaaaccagaagcagtctgcaatggtttgacacgagaggcttatcagcagcagtcctaaacatctgtacagagaatgacaaatcggatgcccagactgtaacattaagtggtctacactgacacaacaccaacacctatattcagggaagactgttctgctaagtagtatgtcaaccaaaccagatcgtaagacaaagacatgcaatcctttaaattttactatcttaaagccagagctacctttttggtctacaggacagacagcactattaagagttgataggcaaggagcaggccttagaattccactactgattgtcaaaaagactagaagaactcagatgtgtccaaccccacaattctgggttcataagtcattctataagcattttgatcagccggtgcccgagcttcccccatcaaccaaaaacttatttgctcaactagctgaaaacatagctggcagcttaggaatttcctcatgctatgtatgtggaggaactaatatgggggaccagtggccatgggaggcaaaggaattaatgccacaaaataacttcacttcgcttaaccctaccagtgaaccaacagcctcaaccagtgtttggttgttaaaaacctccataattggaaagtactgtattgcccaatgaggaaaggctttcacaggggcagtaggagaaacaatctgcctagggcaacagtattatgatgagactaaaaacaaaactctattgaagaaatgcccagaacaactcctacttacaagatcaaaaccctttccctccactgtctattctaagccgcacttggcatcggctagaggctccaaatgcttagaaagcaccctctggcctatattggacctgtggagcacaggcatatcagctgctgactaaatggacaggggaatgtgtgttagaaacaatcaagccatccttctttctaattcctctaaagccaggggaactcttaggatatccagtttatgatgaaaataaaagaactagaagaggcataatcacaaaaataaacacaaatatcaaaaaagatgtggacataggagactggaaagataacaaatggcctcctgaaagaatcattaaatactataggccagctacctaggtgcaagaaaggtcatgggggtaccgtacccccatctatatgctcaactgcatcataaggttgcgggcagtccttgaaattataaccaataaaacatcaagggcactagatttattggcaatacaagcaacacaaatgagaaatgctatatatcaaaataggctggctttagatttcctcttagcctcagaaggaagagtatgtgaaaaatttaatttaaccaattgttgcttagaaatcgatgataatggcctagctgtcatgaaaatcacagctagaatgtgcaagatggcacatgttctagttcagacttggtccaggtggtccctggattccttatttggaggatggttgtcagcctttggagaattcaaaaccctcattagtgagttcttgcttatttttggcatttgcctcatcctcccttgccttttacccctgtttattaggagtattcagtcaactatagaggcaatagtagcctgacacgctaccgcacagttgtggcattaaccagatatcagctgctgccggtagaagaaaaagctcagctccgcgaggaggtggcaaatagtggtgctttctattaacacttctgttgtaaaaagcaccaaaggggacaatggaacaggaattaaaagaaattaaagagtgcgtaagcagaaactgagttgtatatgaaaaaaacccaacttcccctgaaaaagagaaagagctggagtcttttaaaaactaactgcctgtttttctgaggctagtgagccttatctctcctcccttcccaggcattgcaaagaccctgtttccctagctgtgcagctgcaaggtcactagacagataaactcaagtcacaaaacgtgtttttccttgaaatgtaagaaatgatgtaatgcatttctcaattgaataactgtgtttgtttcttacttctctagtatgcttccctctccacagatctcccccctcccacgaaatgcttaaaaggtaactaaactctttgttcagagctcagtcctctggatgttaatccgactgggctggtgcacctaaataattaataaatatcctcctgaaccccatcagtctctctgattccttaaaatcccactacatttcaatcctcatcttttttgctgcctcctctgtgagaccccaaaaagtcacaatgattaactaaaagcagctgaagtctgcatgatcccagtgctagagtgaatgcttaataaatgttcccaaatttgagtgcccttaagaggttcagactggaattcttccagggcatttcattcacgtatgtctatttagttaattgattctttcctgatttggaaattctctttctaggtgtattagtccattttcacactgctataaagaactacctgagactgggtaatttataaagaaaagaggcttaattgactcacagttctccatggctggggaggcctcaggaaacttaaaatcatggtggaaggtgaaggggaagcaaagcatgtattacatggaggcaggagagagagaaagacagagagagagagaagaggtgtcacactttttttttcttgttttgttgttttgtttttttttctattattattatactttaagttttagggtacatgtgcacaacgtgcaggtttgttacatatgtatacatgtgccatgttggtgtgctgcacccattaactcatcatttagcattaggtatatctcctaatgctatccctcccccctccccccaccccacaacagtccccggtgtgtgatgttccccttcctgtgtccatgtgttctcattgttcaattcccacctatgagtgagaacatgcggtgtttggtcgaggtgccacacttttaaaaccatcagatcttgtgagaattcattcactatcatgagaacagcatgggtgaaaacacccctatgatccaattcctcccaccaggtcccttccttgacacatagggataacaattcaagatgagatttggctggggacacagagccaaaccatatcactaggtgaggttttttttttttatcttttgaactaataatgagtttgtgcatcactacatccattgaattacagagggttactgaggccctttgctgacaccttctttcctgttttctcagaggtgtttatgcttttccttccctctaaacactgaccttgttttaggatctggccatccttaaacattcctgcacagaggagctctggaagaatcatagtgttcttatttctatggaatgacaaccatattcaaggcttccactggcttcatagaaatgtgagcaccttccagctacacccaaatctctgtggtcagatgatttgattgatataaactacagtaaatgtgattgacctatatgttctctgaatggcactatgcagaggaaccaatgactaaagaataaatttcaaggccattcctcctcttgtgcaatctggccctccaactggtgatccttacttgataagcacaatgccagtcatgctcactttttttttttctcaaaatgatcagtcacacagagtcagtttactgcttctgtacatcaactatcctgcaggaaaacccattaagtctggtgctccttatggcaggcctgcctgcaactcatctttgatgggttatgtgtgaactccatcaattgcaggttctggatccttgcagaacttcccactctggtgttactgagggatggaagactggaggaaaaagagaggctgcatcccgccgatgtaaccatgcaactgctggtgccacaaagtaggccctataagggtaagttaggaaagtgtggctgaaaattatggtatgcataaatagttttaaatgccccttatgtgctttcagctgaaagagaggtcttccaaaattcaggaacatttctgttgatagaaaagtttcactgtgctacatagcataagtaaccataaaatattccagacagttgaattagaaacttgatttctcttctttataggttagcttttcttagatcctaaatattcagtacaaataaataaatcttataaaatgtgataaagctgaaaaattgcatgaagagaatgtgtttgaaggaccccacagtggcaccctggccaggcccagctgttagcttggttccctctttggggatcttttcctactcacacatcgaaaataacctcttgggtttccagttgtttataatccattatctgcccatgctaaattctggttgttagtctaggtagatcaaaactcatagtcaatcagaaagcatccccaggattgaatgatgtcagtaaacactcttagtaacagaaattggaagttgaatgaagaggaggtggataatgtttatttacttcttcaacggatctgtgtaacatctgtagggtcaagagaacattcctctatggaggtttgatatttgagtctgagaaatgaactaacagtagatcaattaataggagataatccttataaatttatctcatgaatatgcatgggagccttgaaagatatgatactcaaagaatggcctgatgattgaagcttaaatagcattctgagctataaaaatgtagtatcttctgatggggagtgggtgacacaagacatgagagagtgagggaagaaaaagcatgataaacaaaagtcatcttattataatgtctgtcaggcatcagtgctccaaagaacaagtattatcaaccttagtctccctttctgtgagctaatattatttttttcttttttttttcttttagactaagttttgctcttgttgttcaggctagagtgcaatggcgcaatcttggctcactgcaacctctgcctccagggttcaggcgattctcctgcctcagcctcccgagtagctgggattgcaggcacctgccaccacacccagctaatttttgtatatttagtagagacagggtttcatcatgttgaccaggctggtcttgaacttctgacctcacgtgatccacccacctcggctttccaaagtgctggaattacaggtatgagccaccatgcctggccctgctaagattctttttcatgagattatagggagggggctcaagaccattgcttttttttaggaggatcttcctttaggtatgagaacttcagagaaagccccttcctatattttgggagaaatagcagggttgggagacaggagaacataagagttagcttggttctgaagactttctgagacctttcaatttcctttggttcaaagtcctcaacatgcttaagtgccatattttggggtttcatttttggagccccaactttcccctgtcataaacttccctagaaaatgtacatactaaagctgagttgatgcttgtggagaggacaattgaattggtagctgagtcgcaaggaatcacattaaaccagtataaaccagtctcacattcctagcaatgtcaatccagttaaacagctgtgcctcatttcaggaggtgatgttgcaggtctgctgtcatgaaagataggtctgtatatggtgcagttaaacaggtacttaataagaggtcattctaccaaagcaaaaggagaccaaaagttaatcatttagcagactagtttctgagttcacagggcagccagacaaaaagatttctacatgttggttttgaaacagctccagttggagtagaggtaggcaatggtgatctgacagattttttttctctcctatagctccttagggccagatctgaaagactttaagttgttgcaatttctctggagtctgctctatcacaaagaattctgcaaaaatcacatttcctgcctttgtggaccaaaccaatgtatttcttaaatgtatttgatatctcatgcctccctaaaagaataaaaccaagctgcaccctgaccaccttgggtacatgttcttaagacctcctgaaggctgtgtcatgggccatggtcactcatatttggcccagaataaatctcttcaagtattgtacagagtttggctctttttgttggcagcatgtattaactcattctctattacaattcccctgtcttgatgaatgggctctgttgaggcagggggcaaggtgaatctcttgggtggttacagtgaaaatccatacaaaattttacatgcatatgtgctggaggcccacaatatatgagactaaaataaggactgaatgagtaaagcttaaatagcattgtaagctaaaaagtagggagtggcttctgatagggagtttctgacacaagttatgggaaggtgaagggagaaaacacatgatgaacaaaggttattttattgtggagataaagtctctcaggtagcagtgctccaaagaataagtattatcaaactttttctcttttcctgtgaattagttttctgattgatgagattatttggagaggctcaagacaattgcattctttttggaagatcttcccttagtcagataagagaacttcagagcaaccctgcacttcaggagggaaagaatgggggatgggtagacagaagagggtcagagattctgaagacatttgtgaagtctttcagtcttctttagttcaaactactcagtatgacaaagttttatttttttttttgagacggagtcttgctctgtcacccaggctggaatgcagtggtgcaatctccgctcactgaaacctctgcctcctgggttcaagcgattctcctgcctcagcctcccaagtagctgggattacaggtgtgtgccaccatgcctgactaatttttgtatttttagtagagaaggggtttcaccatgttggtctggctggtcttgaactcctgaccttgtgattggcctgcctccacctcccaagtgctgagattacaggtgtgagccaccgcacccagactaaattttacattttcaaatgttgtattaggagtcctaacatattaataatattttatgtgttcacagtatttggcacttaggtaacttcccctccgttatctcttttatcttcaaaacaaataagaaaaagatgggcccaattagcacttcaggtcttagagttaagagcaaacatgcctgcatagttactcacatatagaggagtaccaggctggtagccacaagaacccatgtttccatggcaaagtttggaatgagatccatcaccagttttctttttcagctctgtcttctgagtttttctttcagctgtgtgctgctctttgctgggctgtgcatatagagctttgtttctctgcccagaggtgatttagttaatgttaacagcgatatttatgtgctggagaaggaggtgggtctacagcggcagccagtagaaaagccacttatgctactcctcatatggagggatttgggtacccttttcaaattgacaattggcaaataattatggctgtccttattttggcctcctttgatttcctattctgtgaacaatcagtaaacaaatcagtcactgctattggtaagcccaaaggttatagattctcaggaacctaaagaaaaatacttctgcaagaacatctgcccagcaactgcctgtccaacctcaaactgatgtcagtcttgttattgatctttatagccaaggataatcattccaaaacaaatatgtaatccttctcattatttttttaaactttgtcttactttacctacctgaataagcacatagtttaccttggcacgcatattcccattgcaatgctttattcccaaataaaaataattctttttagaaagcctatctctgtttgttatctaggttgccaaatcatgcctccaggtaaacagacaagaaggactccctgtgcctcaaaagcaaaaacaaacccaagaggccatggcaggtttaggtgatggtcatgttctctgtgttcttagtaagtgttgcaaaacctatttttctgtagccaagtcaaataacattttctgaaaaaatctgtacctgggaattttccaactgctcaccaacagatcatgtggtaagaactaactgaccacctaggaacagccaattaagagacatgtgacttggggcttaaaggctgtctaatcaagactcttttcttcactcctctgactcctctatcctgctctgtggtttttgactttatagctctccacctccgaggctgcatctcctcaatctgcagactgtgttttatagaaaatgaagctctccctctgtcctccacagatcccacaatctttactcatatttcctggtgatgaggaagggatcaaaattggctctcaagatcctctcccttgtcatctggactaatcaatgcattggcaccagcaagagtcctctaagctcagttatcttcctggcctggctgttttgtggaaaaatcagtaaatcctcttacatccaagatctcacatttaggatgaggtcttgaggtctttatttttttcagggaacctgcccttctggctctatggctacccacttgtggggtatgcttgcacttggaggggcatgcccatgtttcttggggtgcattcatgctgcatcaagcaagttcatgcctcacaggatactccatgcttcagtgttgcaaggactatcgcattttatttgcccttgaagggaccccttcctaaggtgagggctatgcataacctaggtcctaaggccatggtctctaaggcctgccatcgggtaattcggtggctctgtctctgatcaatcactatcaggtactctggcagtttttcaagtttaaaatttaaaggtaaaggctcgacagaaatggatgtgagagatacacctaaattgaactccgaagcatgcaatgaggataagaggagtctggacttctcaaagacagtaagaggctttctttcaatctgcatttttgaaagtttcaaacacaattgggactttggctgtgttttactaggagactaacctgaagagttaacccatgtctcagaaaatctgaaaaacttgaagaccctaaaatggagagtcccatatcttcctgctgctgcacttgcattctacctccacttttccctttttaccatcactgtctttgtctggaacattgcagggacctggcaacttggtaccagcaggggccattgagcccctggctccttcatgatgattgaaaactgggtgggtctctcatgagttttggacttcccacttgattgacagctgtcagttttgttcagctagttgttcttacccctggataaaagggggtgaaagaaagtctctttctttgagacttactgtttctcaagaagggggaatcactctgtatttctcctccataaacatatgaatgaatatgtatgctatttctcccattaatctcctttgtgggtgattttttttgttgttaacaaaccttcagaggagaaaggacaaacatttttcttggcctcagcagttctgtccctatgagcaggataccaaagccactctgttctttcagaagcctcagtgaagggagcccaagcacttgtaagtcagcagaaaagtaagaatttctttttttttctttttctttttttgacagagtctcattttattacccaggctggaatgtagtggtgtgatcttggctcactgcaatctccgcctcctgggctcaagtgatccttctatctcagtctcccaagtagctgggactacaggcacatgcctccatgtctggctgagaaaagtaagaatttctttccagacaagctcctggcctttctttctgggagatccacttgggcagatgttaagaattgctctttgtctcctctgcaaaatcttaataaataggagaaaaggatttgtgttactagtgctgggtgcagcaactctagggtactctctagtactttctcttatgaatactcacatcgtttgatccccttttcctctagaaatagtcttttcctttgttcctgtatttctgtgctgttctgtcataaaaggggctacaggagtgtagaacatgggcctgaaacccctataagcccacttgttggagctggctctgcggactgagcagctggtgcttctgaagaacacacctgttgttctacacatgtccagctctcgggggagtttctcttaagaagccccatccctatgggtcttttgcttccctaacccttgtgacttggttagtcctgggaaagtccaatccccggagaacctacccagtgtcacatatcaacaggcctgaacttactggttttggtgtcactcaaaagggtaccttcagttttaaaaaatcaaagcctaaaatgtttataaaggatagatcctcaggtaaaatagactgacttctttttcagaattattcatagtacagccaaacattaaaatgctttctttggctaggtaaggaggctcacgcctgtaatcccagcactttgggaggctgaggcaggtgactcacttgaggccgggagttcaatatcagcctggccaacatgatgaaaccccatgtctattaaaaatacaaacattagctgggcatggtagcgcatgcctgtaataccagctactggggtggctgaggtgatccagaggatcacctgagcccgagaggcagaggttgcagtgagctgacatcacaccactgcactccagcctgggagacagagatagactgtttcaaaaaagagggaaaaaaagctttcatcactctatttaagagctccatcctgaattcagtaatctaatcaagaaatttccataaaaagataagaaaattatggagaagacatcacaataatgttataggatccttgaggtgttgcttttatggcctaaaacctctggccagtggcacctttgcccaagttttgctcggacttgctgggcttcttccacccacttgggttggcaagctgcacacagtccacactaccagcctggatcccatgcctgccaagggtgagttaggaatggagccatgaggggtgtgtgaatgaatgtggggtcaggccactgcacagtcagacactacagccgctgcagtgacaggcagctccaggtgccggcacaggcactggctctctgtgaggctgtggctggaccaggtgcactgcaagcagtttccccagccagcactggggaatgcagtggttactgcaaacttggagacaccaggcactgcaggataccaaagagtcacaaccctgttttggggagcttccaggtctgggctccctgaaggactgtggctcttctctccttctctttgcctgcaacgtggtgagcaaggggcatgtttcagccctgtttatgttatagctgttttacctctgccattcagtgggtcctgagttcttgtccttcgaccaggaagaatgaggtatgcagacaggtggagggaaagcaagatgaagaggagcattattgagcaatagaacagctcacaggagacccacaaagggtagctactttccacagtcagggtgtcccgatcagtgttcagctcctggcagagaagacaccctgggttgggaggctcctctcttcaggtaggtcatcctgtcatctctgcagctctcagcagagagggggttttggagtgggttgctcctctctgcagctggtagtctgcatgtctctgcgggtctctgaggctctcagcagagaggaggccctagagtgggtagcccctctctgctgctggttgtctaaatgtctcttgctatcagcagagagggtagctcatttctgcagctggtccacctgatgtctgctcagctctagcagagcctggggcttttatgggccctagaggggaggaagtgtgcactgatcggtccttgggcagccatggaagggctggaaaaagaatcacaacttcccagtctggtcaatgggattggcagcccagccaccagccttcaggccctccctgacctgaaggtggggcctcactggggacccacctacttctacctgggaatctgtctgcctcctgcttccattcttggcaccagggctcagcctcactttgctatgagattggagagggtgctgacagcagggagaagccagggagcaggagcaggcactttggagcctgtgagggtaggggggccttcctgggcccccaagagtgcagggatgcctgagtctgcagctggtgggtggctgcagctgtgcagggtaggggggatgggggtgaggaaaggtggggtgggttgtaggggtgggtgagggaggatttctgcctgctccatggagctggaggcctgggtctgcagctgtggtttgggtggctgcagcagcacccagggagctcctgccccaacttgggcagggctccatggagtgtgcagccccgcccacctccctgctgcagccagcgtaatggcagtggcaggctgtctggagcagccactgccatcaataacctttgtacacttgttcccagttatagaatttatgcaaatagatctataaaaataaatgtactgaccactttaggacaaatattagagagaccacaagaaactttgcaggacaaccagagtctctaaatttcttagcttaaatggttttaacaaaatgctcaagttttatacagctaattgctacaagtctgtaactaaaacctagattatagtagctcagtgcatataacttacagataagtctattttgtaaccttgcctttcatgacaaaagtcttttgacttttgttttttggctcttatattacttaaaaaagattttaaggattgatgaatgccttcccacctctattcctgtctggcctagaacatataaatcagcgattagtcttttggctttaagtcctttggccataagagccccatggagggacagggtggacttggggcagacagccacaccattacagcaatgatgagaccaaataaaagtctgccattgatgttggctctggaaaatcttggcccaaataaaggagaatgtaaaccaaaaacaaaatcccaagccccctccaccaaataaacagacccaccgttggctaagtggaccccagaggaacctgaaaaactgaattccagggcatgaggaaaagggaggtccagcatgcctcattataccccctccattgctcactgtcattagaccttctttcctaaaggtgaaaaagaaagcagccccttcaaaagattccacaccaatattgtcagttatgagcttatccttccaggtacagggtaaggataagatgagattaatccttccctcacccttccctgagatatctacttcctctattactttttctttaaatgttcaccttatcatatgacaaggcactaactaaagtctcacaagtatgtaatcactcatctcataacacccccccaccattttaaaggaaaatgtataaatattaaatctctgagaacctctttggaaaaaaaccagccacagatgcatgtgtgacttacatttttcctgggcatgcacttaagctggctcaataatcctcggtgattgagacttatgcttcagtcactcattttggtgaaggttgagatgacaaaagccctcatggacttgagcctcttaagactaactcccctaagagctggcatggtcagacaaagagaatgctactttctacttcatgtcatgggtccctggcctttttgactagcagccagatgggaaccaaaaatcagacccccaggtaacagagaccagagagagatgttctcacttggcaacaaagccaatttctcaggacatacaaatagacaaaaggaagatctcatttgatttttttctgagagatacactgcaaagtttgcctaaacagatgctggtctgctgagaaatatgaagtcaccagtctgcttggtgggcttaaatgacaggcttataaaaagaccttatgcccatgttctgccctacaattctcctctttctgacaaatgacaacaagacaaaggaaagcaaagaccatctctgaaggggcagggaccagaaatgcagaatactcatagcaaaaataaaaacactagatgtataccaagaacaagtttacaaaaaggttttctactactaatctaagtttggaaagaaacatgagactagtagtgatattaccacttgttcaacctggttccacaagcagagatccaggagacagactgggtaaggattcctacctttctccagcttcatcaggtctcagggtctctcaactgtagcttcagaagctgcggagtgactttatctcctggttgtctcaccaaaactgtaggaggtggggagagaaaacttcagttcctctggaggcttaatgtttgagtctgagaacctgacaatggattgattaacagcacctgtcatctcagttactcgggaggctgaggcgggaggatgatttgagccctcaggaggctgaggtgggaggatgatttgagcccagttgttctaggctgcagtgagctatgattgcatcactgcactccagcctgggtcacagagccagactctgtctcaaaaaaaatgcatacacatttatgaaatgcatacacactggagactcacaatatataagactaaataatgaccaggtggttgaagcttaaatagcattgtgacttactaaaaatttaaagacttctggtggggagttggtgacacaagctatggaaggataggggagaaaatgcatgatgaacaaaggttattttattatggagataaagtgtgtcaggtagcagtgctccaaagaataagtattatcaactttctacttctttcctgtaagttaatattctgtttgttgatattatttggaggtgctaaagacaattgcattctttctggcaggtctttccttagtcagataaaggaacttcagagaaagcccctctctgcacttttggagggaaagtatgggaggcaggagaaggtcagagagaccttagttctgaggccatttctgagatcctccagtcccctttagttcaaagtactcagcttgccacagtgtcctattttcaagtgttttcttctgagccccaacagatcagtaatgataatttatgtttgtagcattcaatgcttaagcaacttcccctccattatgtctttcatcttcaaaacaaataagaaaaataggcctgattagcactaaaagtctaaagttacagagcagatggcctggacagttattcacaggtagaggagcaccaggctggtagccaggagaacacacatttccatggcaaagtttggaatgagatccatcgcattttctttttcaaatctatcttctgagtttttctttcagctgtgtgccgcttttggctgggctgtgcatgtagagctttctttctctgcccagaggtgatttagttaaggttaacaggaatatttatgtgctggggaatgagttgggtccatagctgcagccagtagaaaagctacctatgctgctcctcatgtggagggattggggtgctcttctcacattcacagttggtgaagaattatggccacccttattttgacctcctttgactttatattgtgtgatatcagtaaactaatcagtgtttgataagccccaagagttatagattcttatcagaaactcttgtgaagtcattggcattcaatctctaaccagcccttatcttcatggctgccttcaatccaaaatacttcaaatccatcaaaataatgcacacatacacatctttatccaggaagtttccactgcctagaatttctctatactccctagaagactactattcatcctttcaaacccagatcagatagacttctttttaagtttttattcatttatgtttctttttttcccacgcaatatacctatgttagcctgtacatgcattgctataaagaagtacctgagtctgggtagtttataaagaaaacaggtttaattggttcacgattctgcaggctatacaggaagcatgactggggaggtctcaggaaacttacaatcatggtgcgaaggcacatcttatattgaccagagaaggaggagggagagagagaagagggagctgctacacacttttaaacaaccagatctcatgagaattcactcactatcatgagaacagcaagggataagtctgaccccatgacacccaatcacctcccaccagacccctcctccaacattgaggattacaatttgacatgagatttgggtggggtcacaaatccaaaccacatcaatacccatataataatttgttttatttatttttttgagacacactctcactctgttgcctaggctagagtgcagtggcacaatcatagctcactgtaacctcaaactcccaggctcaagcgatcctcctgccttagtctctggagtagctgaggatacaggtatgcatcagcacacctagctaattttatttttttatttttatttttgtagagactgtgtgtctatgtttccgaggctggtctcgaattcctggcttgaagtgatcctctggcattggactctcaaagtgctgggattataggggtgagccactgcaccaagcccagacctctcctattagaggctttctctgatttaggaatcagacatgactgcttcctcctctgggcaacttctttcccccctcccatggttctattattgtctttcctcctctccagcaccgtgttggtttccacacatgagcagtggtgatcccttaccagagcatgagcttcttaaggacagtctgagtattattcaccactatgtctgcaggccctagctgagtcctttacacagagtgggcatccagaaagatttgttgagtttagttgggttagattgctgcatattgcaaaacttttcctgggactctttccctaggactctggtgaccaagccactttcctgcatacagcaagagcttttggctgggcctcagctgccattcctgtacattcagaatgatccaccaggattctgttgtcaagagggcctgtaatggagacacagggaaggagatgaagatgacggcttcagtgagaagcagcatactgtgctgcttcctgtgcaccccctcaaatggttctgcagaagacggaaagctagagatgctcctgaccaaagaatgcccctctctctggaaataatgcatgtctgggaacaatgggtgtgaaaggagagaagaggagaacagctacctggattgccaggtggactccagccaccttagccaccagggatgtggctgatgtcactacaagcagcacatacaacatcaaggactccaataagatgatttgagcttcttctttggggtagtaggggtcagaacagacacatcctgctttctgaagagtgaaatatttaccccaggagctggtaaggatgaggcctgcgacagcaatgctgtcatctgagagcccctctatgcctgcttgctggaagagatcccaaagctgagcctttggaaatggcactggctcattatcatcactgacccatgttccatgtctccttgccctgaggaattatgaattatgtgacaagtaaatcctcgacattcttaaaagtcagcagaaatacagccctaaactcctgggctcaagtgatcctcctgccctagcctctcgagtagctggaactacaggcatgcatcaacatgtccagactttatttgttgttgtagatatggggtcttgctataatgcctaggctggtctcaaagtgcgggctcaagcaatccttctctctcagcctcccaaattactgggaatacagacatcaaccactgagcctgatcttgatagaaattcttagtaaaaaggatgacttttaaatattaaatctagattctcaagcagtatggtaaactatttttgaaaagccatatacaattaaatttgtatatgttaaaacttgcaaaataatcttgagtaggctggacgtggttgcttatgcctgtaatgccagcactttgggaggccaaggccagcggatcacaaggtcaggagatcgagaccatcctggctaacacagtgaaaccccgtctctactaaaaatacaaaaaattagccgggcatggcggcgtgtgcctgtagtcccagctacttgggaggctgaggcaggaggatggcgtgaacctgggaggcggagcttgcagtgagccgagatcttgccactgcactccagcctgggcgacagagcaagactctgtctaaaaaaaaaaaaaaatcttgagtagatattatacattttaattatacaagcagccattgacttctgaaaagtccagtaacccctcctaattaaacccatcctatgaaatgatgggaagagggcttcaggagactttatttatttatttatttattgaaacagagtcttgctctgtgggccctgagctggagtgcagtgaagtgatctcggctcatcgcaacctccgcctcctgagttgaagcacttctcctgcctcagcctcccccgtagctgggattacaggtgggcactactgagcccagctaatttttgtatttttagtagagacggagtttcaccatgttggccaggctggtcttgaactcctggcctcagtgatcagcctgcctcggcctcccaaagtgctgggattacaggcatgagccaccgcgcctggcctgtgcttttgcttttaacatctcatcttggctacaaagagcagtgcaaatggggaacttctcaagtcctacagcattttgaccatagttttagcctcactcttatcaagtcagcaacactgtaacttccaatctcagttgagtggagggcaagcaaattgctatagagactgagaaacatcagcctgtagatgcctgggagctgggctagggactatcttccccttcccaaatgtgccacaagcctgctttctcccgcactgagccccctatttgtacagatgcacagattggctacaaagcttccattaagccacaaataggatgaaaaccatctctaccctcctccattcccatgcagaaatcctgcttcagagaaggagttgcatattgaatgcatgaatcctagaaataagacttagaaggtcttgtttgacatcaatcaatgacaactgtctttaagttcatcagggaaaagatcccaacttttctataaaggtaacaccatgttatttttaattttaaagtgacatgaatgtatttttctaagagacagacaaacacacccacaaacacccacacatacataaatgtcagattaaaattaaaaattaaataccttaaaatttgtggccaggaaccccaattcaactgcaaatcactccttgaacatttactgaatgcttgccatggaaatgtcccctgcaaagtgctatttgaattttatgaaagaaataaaatgaagtgatattttttaaggggctgaggacagacattcttagatatagagagaacttagtaaacaaacatgaatgatttagtgacaaatatgaaatcaggtgatgataacagcctgcagtaatgaataacaaagcagaggactgaatgggccctggactagatggaagggcttttcggaggaggttggggattgaaccaggacatgaaggatggggagaggataagaaagagagagggaagaacattcatagaattattgttgggttgagaactagcttggcttgtcagcaggaagggtcctggaaggtgagttctaacagtcaggatgaccctgacctctgggagattttctactctggaagaaatgtcttgatttagtgattctcaaatttggtttcacatgagaagcaatggagaggatgtttaaagcaacactgtggggaaagtattttagaatctctgagatgacacaagcatcgtgaatatttaaaactcccaggtgatcacaatgaacagctagtggttgagaaccactgtcataagaaatcttctggaaattcttttttaaatttttatttatttaaatttaaaatttttatttttggtgggtgtgagaaaacattttaaatgatccattttctttttttttttttttaatgtttttttttttaattatactttaagttttagggtacatgtgcacattgtgcaggttagttacatatgtatacatgtgccatgctggtgcactgcacccactaacgtgtcatctagcattaggtatatctcccaatgctatccctcccccctcccccgaccccaccacagtccccagagtgtgatattccccttcctgtgtccatgtggtctcattgttcaattcccacctatgagtgagaatatgcggtgtttggttttttgttcttgcgatagtttactgagaatgatggtttccaatttcatccatgtccctacaaaggacatgaactcatcattttttatggctgcatagtattccatggtgtacatgtgccacattttcttaatccagtctatcattgttggacatttgggttggttccaagtctttgctattgtgaataatgccgcaataaacatacgtgtgcatgtgtctttatagcagcatgatttatagtcatttgggtatatacccagtattgggatggctgggtcaaatggtatttctagttctagatccctgaggaatcgccacactgacttccacaatggttgaactagtttacagtcccaccaacagtgtaaaagtgttcctatttctccacatcctctccagcacctgttgtttcctgactttttaatgattgccattctaactggtgtgagatgatatctcatagtggttttgatttgcatttctctgatggccagtgatgatgagcattttttcatgtgttttttggctgcataaatgtcttcttttgagaagtgtctgttcatgtccttcgcccactttttgatggggttgtttgtttttttcttgtaaatttgtttgagttcattgtagattctggatattagccctttgtcagatgagtaggttgcaaaaattttctcccatgttgtaggttgcctgttcactctgatggtagtttcttttgctgtgcagaagctctttagtttaattagatcccatttgtcaattttgacttttgttgccattgcttttggtgttttggacatgaagtccttgcccacgcctatgtcctgaatggtaatgcctaggttttcttctagggtttttatggttttaggtctaacgtttaaatctttaatccatcttgaattgatttttgtataaggtgtaaggaagggatccagtttcagctttctacatatggctagccagttttcccagcaccatttattaaatagggaatcctttccccattgcttgtttttctcaggtttgtcaaagatcagatagttgtagatatgcggcattatttctgagggctctgttctgttccattgatctatatctctgttttggtaccagtaccatgctgttttggttactgtagccttgtagtatagtttgaagtcaggtagtgtgatgcctccagctttgttcttttggcttaggactgacttggcgatgtgggctcttttttggttccatatgaactttaaagtagttttttccaactctgtgaagaaagtcattggtagcttgatggggatggcattgaatctgtaaattaccttgggcagtatggccattttcacgatattgattcttcctacccatgagcatggaatgttcttccatttgtttgtgtcctcttttatttccttgagcagtggtttgtagttctccttgaaggggtccttcacatcccttgtaagttggattcctaggtattttattctctttgaagcaattgtgaatgggagttcactcatgatttggctctctgtttgtctgttgttggtgtataagaatgcttgtgatttttgtacattgattttgtatcctgagactttgctgaagttgcttatcagcttaaggagattttgggctgagacaatggggttttctagataaacaatcatgtcgtctgcaaacagggacaatttgacttcctcttttcctaattgaataccctttatttccttctcctgcctgattgccctggccagaacttccaacactatgttgaataggagcggtgagagagggcatccctgtcttgtgccagttttcaaagggaatgcttccagtttttgcccattcagtatgatattggctgtgggtttgtcatagatagctcttattattttgaaatacgtcccatcaatacctaatttattgagagtttttagcatgaagggttgttgaattttgtcaaaggctttttctgcatctattgagataatcatgtggtttttgtctttggctctgtttatatgctggattacatttattgatttgtgtatattgaaccagccttgcatcccagggatgaagcccacttgatcatggtggataagctttttgatgtgctgctggattcggtttgccagtattttattgaggatttttgcatcaatgttcatcaaggatattggtctaaaattcccttttttggttgtgtctctgcccggctttggtatcagaatgatgctggcctcataaaatgagttagggaggattccctctttttctattgattggaatagtttcagaaggaatggtaccagttcctccttgtacctctggtagaattcggctgtgaatccatctggtcctggactccttttttgttggtaaactattgattattgccacaatttcagagcctgttattggtctattcagagattcaacttcttcctggtttagtcttgggagagtgtatgtgtcgaggaatgtatccatttcttctagattttctagtttatttgcatagaggtgtttgtagtattctctgatggtagtttgtatttctgtgggatcggtggtgatatcccctttatcattttttattgtgtctatttgattcttctctctttttttctttattagtcttgctagcggtctatcaattttgttgatcctttaaaaaaaccagctcctggattcattgattttttgaagggttttttgtgtctctatttccttcagttctgctctgattttagttatttcttgccttctgctagcttttgaatgtgtttgctcttgcttttctagttcttttaattgtgatgttagggtgtcaattttggatctttcctgctttctcttgtaggcatttagtgctataaatttccctctacacactgctttgaatgcgtcccagagattctggtatgtggtgtctttgttctcgttggtttcaaagaacatctttatttctgccttcatttcgttatgtacccagtagtcattcaggagcaggttgttcagtttccatgtagttgagcggctttgagtgagattcttaatcctgagttctagtttgattgcactgtggtctgagagatagtttgttataatttctgttcttttacatttgctgaggagagctttacttccaactatgtggtcaattttggaataggtgtggtgtggtgctgaaaaaaatgtatattctgttgatttggggtggagagttctgtagatgtctattaggtccgcttggtgcagagctgagttcaattcctgggtatccttgttgactttctgtcccgttgatctgtctaatgttgacagtggggtgttaaagtctcccattattaatgtgtgggagtctaagtctctttgtaggtcactcaggacttgctttatgaatctgggtgctcctgtattgggtgcataaatatttaggatagttagctcctcttgttgaattgatccctttaccattatgtaatggccttctttgtctcttttgatctttgttggtttaaagtctgttttatcagagactaggattgcaacccctgcctttttttgttttccattggcttggtagatcttcctccatccttttattttgagcctatgtgtgtctctgcacatgagatgggtttcctgaatacagcacactgatgggtcttgactctttatccaacttgccagtctgtgtcttttaattgcagaatttagtccatttatatttaaagttaatattgttatgtgtgaatttgattctgtcattatgatgttagctggtgattttgctcgttagttgatgcagtttcttcctagtctcgatggtctttacattttggcatgattttgcagcggctggtaccggttgttcctttccatgtttagcgcttccttcaggagctcttttagggcaggcctggtggtgacaaaatctctcagcatttgcttgtctataaagtattttatttctccttcacttatgaagcttagtttggctggatatgaaattctgggttgaaaattcttttctttaagaatgttgaatattggcccccactctcttctggcttgtagggtttctgccgagagatccgctgttagtctgatgggctttcctttgagggtaacccgacctttctctctggctgcccttaacattttttccttcatttcaactttggtgaatctgacaattatgtgtcttggagttgctcttctcgaggagtatctttgtggcgttctctgtatttcctgaatctgaacgttggcctgccttgctagattggggaagttctcctggataatatcctgcagagtgttttccaacttggttccattctccacatcactttcaggtacaccaatcagacgtagatttggtcttttcacatagtcccatatttcttggaggctttgctcatttctttttattcttttttctctaaacttcccttctcgcttcatttcattcatttcatcttccattgctgataccctttcttccagttgatcgcatcagctcctgaggcttctgcattcttcacgtagttctcgagccttggttttcagctccatcagctcctttaagcacttctctgtattggttattctagttatacattcttctaaatttttttcaaagttttcaacttctttgcctttggtttgaatgtcctcccgtagctcagagtaatttgatcgtctgaagccttcttctctcagctcgtcaaaatcattctccatccagctttgttccgttgctggtgaggaactgcgttcctttggaggaggagaggcgctctgcgttttagagtttccagtttttctgttctgttttttccccatctttgtggttttatctacttttggtctttgatgatggtgatgtacagatgggttttcggtgtagatgtcctttctggttgttagttttccttctaacagacaggaccctcagctgcaggtctgttggaataccctgccgtgtgaggtgtcagtgtgcccctgctggggggtgcctcccagttaggctgctcgggggtcaggggtcagggacccacttgaggaggcagtctgcccgttctcagatctccagctgcgtgctgggagaaccactgctctcttcaaagctgtcagacagggacacttaagtctgcagaggttactgctgtctttttgtttgtctgtgccctgcccccagaggtggagcctacagaggcaggcaggcctccttgagctatggtgggctccacccagttcgagcttcccggctgctttgtttacctaagcaagcctgggcaatggcgggcgcccctctcccagcctcgttgccgccttgcagtttgatctcagactgctgtgctagcaatcatcgagattccgtgggtgtaggaccctctgagccaggtgtgggatatagtctcgtggtgcgccgtattttaagccggtctgaaaagcgcaatattcgggtgggagtgacccgattttccaggtgcgtccgtcacccctttctttgactcggaaagggaactccctgaccccttgcgcttcccaggtgaggcaatgcctcgccctgcttcggctcgcgcacggtgcgcgctcacactggcctgcgcccactgtctggcactccctagtgagatgaacccggtacctcagatggaaatgcagaaatcacctgtcttctgcgtcgctcacgctgggagctgtagaccggagctgttcctattcggccatcttggctcctcccccttaaatgatccattttcaaggcatggtaaatctaagcactggcagccagcctgtggatgtaacaaactgcacggctcatgcacctagaaggtcataataagtgaacagaatgtagaggaggggtcagcccataaaagggaagaaagttttattatcaggaagtcaaacttaagcagggaagggaaccggggtataaccttataagggggataatgaaacttaggcgatgtccaggaagataactctgtagtacttgaccaatgaggaactgggggaaggaattctgtgctaggagataaattacctgctgtaactgccctggttgtacctgcctaccagacacccgatcttgcaaggccaccattaaaagtcttgcttccggccaggtgcagtagctcacacctctaattccagcactttgggaggccaaggccaggagtttgagaccagcctggccaatatggtgaaacactatctgtactaaaaatacaaaaaatacaaaaatacatggacattgtccatggcaagcattcagtaaatagtcaaggagtgatttgcagttgaattggggttctaggccacaaatttccaagcatggtggtgcacacctatagtcccagctacttagaaagctgaggcaggagaatcgttttaacccgggaggcagaggttgcagtgagctgagatcacaccattacactccagcctgagcaacagagcgagattttgtctcaaaaaaaaaaaaaagtctcacttccactgttcttcatgtctccaagttcattctttgggtttggacaggtgaatgtgtttaccacaaacttgtggacccacctggggcttctgtgcctgtgtggagtgggactcttgctgagaggggagacacatctcacctgatttagatagcccgctctgtttaggtatcccgacttcccgcagaggccatagacaaacctgagactgttattcaggaggcagaggaggtgacacaggaggaaagaaggcaccacagcaaccaggcaaccttgtgtatgagccgaggaagaaaaattggaccataagtactaccttggtggttgggcatttttggaggtcaagtgtgtgtgactgagatgtatcctagatatgaagtgagtgcggagtcccaatctgcagttctgttctcccacgagggaaatggccatagatggatgaagcgattctcagggtgtgcaggaaacctccagtgaggctggggggtggttgagtacacagggaaaaagctcagacacagagactgactgaagatgagaaacagaaattctaggcctaaggcacaaaggaaagagggagccaaaaagattccctctgacattcccccggacagtcctttagggataatgctgcaggtttggagggacaaccctcaagccagggacaaagaaaagaaaagatggtaagtactgctgttttatctgtcctaaagaccccattcataagccttcagtcttttgacctaggtttggcccagatgaggattgggtgtgccaagctttatttttctatgtgaatgataaaaccccatcctcacaagagataagttatgctgtctgctggatcaaggaattagccctcatattcccccttcaaagaaaaagaaaaagaacctagtaaaaaatccttgcccagtgaaaagccatgggaccccctatcatgcttgccccctccatacctctcgcaaaataggggacaggaagatcaaggggcagcaggaggattagcggaagaaagacctggagaccatgggggagccgaacaaattgctcctttaaaaccttatccaaattcaagcaaagtattagaacagtgaagtagactgagtacaagtcccttagcagcattacaaaaggtccaaaagcctatagtcctggaacaggaattaaaagaaattaaagagtgtgtaaagcagaaactcagttgtatataagaaaacccaactccccctgagaaagagaaagagctggagtcctttaaaattaactgcctgtttttctgtggctagtaagccttatctcttctcccttcccaggttttgtgaagactctgtttctcttgccatgcagctgccagatcactagacagataaactcaagtcacaaaacatatttttccttaaagagtaagaaatgatgtaatgcatgtctcaattaaataactgtctttgtttctctcttctgtagtatgcttccccctgtacagatctcccccgacccatgaaatacttaaaagataaccctttgttcaaggctcagtcctttggatattaatctgactgggctttctatcagacttgtctttctttttaaggctgaataaccttccattttgtgtatacatcacatttcgtttacccattcatatgtcaatggacacttaggctgtgtctaccttttggatattgtgaataatgctgctatgaacatggcttaaaaaatatctttttggagtccagtttcagttattttcggtatatatccagaaataatatcactggatcatacagtaattgtattcttaattttctgaggaaccaccacacttttccatagtggctgcaccattttacattcccaaatagaagctacagatgttccagttcttccatatcttcaccaacatttgctattttttagttgttttttttatagtagctatcctaatgggtgtgaggaaatatctcatcatggttttgattagcattccctaatgatttgtgatattgagcattttttcatgtgctttttgctatttgtatatcttcattggagaaatctctattgaagtcctttgcctattttttaagtcaggttatttgtttttgttgttgctgaattacaggaattctttatatattctggatattaaccttttttcagatacttaaattgcaaatattttcttacattctataaattgctttttcacttcgttgattgtgtcctctgtcacacagagtttaatttcaatgtagtccacattatctatattttcttttgtcgcttgttcttttggtgtcatattcaagaactcattgccatatccaatgtcataaatcttttcccttatgtttctttctaagagtttttatagctttagctcttttacttaggtctttgatccatttcagtgaatttttatgtatggtgtaagctaacggccaagtttcattcttttgcatgtagatatcaattttcccaatactatttgttgaaaagactgtctgtccattccctattggtcttggcacccttgtcaaaaatcatttgaccatgtatacaaagttgatttctgagctctctgttttgatccattgatctctatgtctgtctttatgccagcaccatactgttttgattactgtagctttgtagtaagttttgaagtcagaaaatgtaagacctccagctttgtaattttttcaagattattttggctatttggggtcccttgagattttgcatgaatttttttgtttctaacaaaaaaacccaccgtttggatttggacagaaattgcattaaatttacagatctctttgggtagtattgacattgtaagtatattaagtcttccaattcataaacatgaaatgcctttccatttattggcgtctttaatttctttaagcaatgttttgtagttttcaatgtatgtttctttccttcttggttaagtttattcctaagtattttattctttttgatgctattgtaaatggatttttttcttaattttcttttcagacggctcatagttagtgtatagaaacacaactgatttttgtgtgttgattttgcatcctgcaactttgctaaatttgtcttgaactcctgatctcaagcgatcctcccagctcagcctcccaaagtgcctgggattataggcatgagccaccatgcccaactatgccaaatttgtttattagttctagcagcttttcttgtggaatcttcagtggttgctacatataaaatcatgccatttgtgaacagggataattttacttcttccattctaacttggatgccttttatttatgtttcttagttaatcgatctggctagtgcttccagtattatgttgaatagaagtggtaaagtagatatccttgtcttgtgcctgatcaagcagaaaaagttttcagtctttcataaatggaaatgaagacatatgtggcctttattatgttgaggtattttccttctattcttaatttattgagtgtttttatcatggaatggtgttaaattttgtcaaatactttttctgcatcaatttagatcatcaatcacgtagtcttttttttcctcttcattctgttaatatggtgtacattggttgattgacatctgctgaatcacccttgcattctaggaataaatctcatttggttatggtttataatccttttaatatgctgttgaattctatttgctagtattttgatgaggatttttgcaccaatattcatcagatattttggcctatagttttcttgtagtgtctttatttttctttggtatcgaggtaacactgcctcatagaatgagtttggaaatgctccctccctttcaattttttggaagaattcgaagacaatttgtttttgacaatgatccctttaatgtttggtagaattcaccagtgaatccatgtgtcctggactttttattatgggggggttttgatcagtgattcaacctccttaacagtcacagatctgttaagattatttatttattctgattcaaacttggtaggatgtgtttttataggaatttgtccatttaatcaaggttaaccaatgcattgttgtacaattgttcatagtactatcttattatttttatttttgtaaatttgatagtcatatcctttcttttctaatttccattatttgtgtatttttttcttactgtatctaactaaaagtttgaccattttgttgatcttttaatgaaccaactcttggtttcattgattttctctattgcttttgtattcctgattttgtttttctttgctctaatctttattattaccttacttttgctagctctgggtttagtatatttttcttttccagtttcttaatgtataaggtcagattgtagatttgagatctttcttctttctattttttttctgtgataacagattaatttaaattctagacctgaagctctacaagggtatgctctttaaacattctataaatgtgtacaactgtgcaataccacttaaaatctcagaaaacgaacacactttagaattgtttaaacacaatccacagaattaaaaacaaaaccagaagccattcacagttatactattgtcaattaaaagttttatacttaatacttgatataacagtcaatatctagtgggggatattgaaagtgatttcagggggcagagccaagatggccaaataggaacagctccagtctacagctcccagtgtgagtgacgcagaagacgaatcatttctgcatttccaactgaggtatcgggttcatctcactggggattgttggacagtgggcacaggacagtgggtgcagcacactgagcatgagccgaagcagggtgaggcatcatctcacctgggaagtgcaaggggtcagggaattccctttcctagccaaggaaaggggtgacagacggcacctggaaaattgggtcactccctccctaatactgggcttttccaatggtcttagcaaatggcacaccaggagattatatcctgcgcatggctcagaggttcctatgcccatggagcctcactcattgctagcacagcagtctgagatcaaactgcaaggaggcagtgaggctgggggaggggcgcccaccattgccgaggcttgagtaggtaaacgaagcagctgggaagctcgaactgggtggagcccaccacagctcaaggaggcctgcctgcctcagtagactacacctctgggggcagggcatagccaaacaaaaggcagcagaaacttctgcagacttaaatgtccctgtctgacaactttgaagagagtagtggctctcccagcatgcagcttgagatctgagaacagacagactgcctcctcaagtgggtccctgacccccgagcagcctaactgggaggggcagactgacacctcacacggccaggtactcctctgagacaaaacttccagaagaatgatcaggcagcaacatttgctgttcaccaatatccactgttctgcagcctctgctgctgacacctaagcaaacagtgtctggagtggacctccagcaaattccaacagacctgcagctaagggtcctgactgttagaaggaaaactaacaaacagaaaggacatccacaccaaaaccccatctgtacatcaccaccatcaaagaccaaaggtagataaagccacaaagatggggaaaaaacagagcagaaaaactgaaaattctaaaaatcagagcacctctcctcctccaaaggaacacagctcctaaccagcaacggaacaaagctggacagagagtgactttgatgagttgagagaagaaggcttcagacgatcaaactactccaagctaaaggaggaagtttgaacccatggcaaagaagttaaaaaccttgaaaaaagattagacaaatggcttactagaataaacaatgcagagaagtccttaaaggacctgatggagctgaaaaccatggcacgagaactatgtgacaaatgcaaaagcctcagtagccgaagcaaacaactggaagaaagggtatcagtgatggaagatgaaatgaatgaaatgaagcgagaacagaagcttagagaaaaaagaataaaaagaaatgaacaaacctccaagaaatatgggactatgtgaaaagaccaaatctatgtctgactggtgtacctgaaagtgacggggagaatggaaccgagttggaaaacactctgcaggatattatccaggagaacttccccaatctagcaaggcaggccaacattcaaattcaggaaatacagagaacaccacaaagataatcttcgagaagagcaactccaagacacataattgtcagattcaccaaagttgaaatgaaggaaaaaatgttaagggcagccagagagaaaagtcgggttacccacaaagggaagcccatcagactaacagctgatctctcggcagaaactctacaagccagaagagagtgggggccaatattcaacattcttaaagaaaagaattttcaacccagaatttcatatccagccaaactaagcttcataagtgaaggagaaataaaatactttacagacaagcaaatgctgagagattttgtcaccaccaggcctgccctaaatgagctcctgaaggaagcactaaatatggaaaggaacaaccagtactagccactgcaaaaacatgccaaattgtaaagaccatcgaggctaggaagaaactgcatcaactaacgagcaaaataaccagctaacatcataatgacaggatcaaattcacacataacaatattaaccttaaatgtaaatgggctaaatgctccaattaaaagacactgactggcaaattggataaagagtcaagactcatcaatgtgctatattcaggaaacccatttcacgtgcagagacacacataggctcaaaataaagggatggaggaagatctaccaagcaaatggaaaaccaaaaaaggcaggggttgcaatcctagtctctggtaaaacagattttaaaccaacaaagctcaaaagagacaaagaaggccatttcattatggtaaagggatcaattcaacaagaagagtgaactatcttaaatatatatgcacccaatacaggagcacccagattcataaagcaagtctttagagacctacaaagagagttagactcccacacaataataatgggagactttaacaccccactgtcaacattagacagtcaacgagacagaaagtcaacaagtatatccgggaattgaactcagctctgcaccaagtggacgtaatagacatctacagaactctccaccccaaatcaacagaatatacattcttttcagcaccacaccacacctattccaaaattgaccacatagttggaagtaaaacactcctcagcaaatgtaaaagaacagaaattataagaaactgtctctcagatcacaatgcaatcaaactagaactcaggattaagaaattcactcaaaaccgctcaactacatggaaactgaacaacctgctcctgaatgactattgggtacataatgaaatgaaggcatgttctttgaaaccaacgagaacaaagacacaacataccagaatctctgggacacattcaaagcagtgtgcagagggaaatttatagcactaaatgcccacaagagaaagcaggaaagatctataattgaccccctaacatcacaattaaaagaactagagaagcaagagcaaacacattcaaaagctagcagaaggcaagaaataactaagatcagagcagaactgaaggaaacagagacacaaaaaacccttcaaaaatcaatgaatccaggagctggttttttgaaaagatcaacagaattgattgactgctagcgagactaataaagaagaaaagagagaagaatcaaatagatacaataaaaaatgataaaggggatatcatcaccaatcccacagaaatacaaactaccatcagagaatactataaacacctctatgcaaataaactagaaaatctggaagaagtggataaattcctggacacagacaccctcccaagactaaaccaggaagaagttgaatctctgaatagacccataacaggctctgaaattgaggcaataattaatagcttaccaaccaaaaaaagcccaggaccagatggattcacagctgaattctaccagaggtacaaggaggagctggtaccattccttctgaaactattccaatcaatagaaaaagagggaatcctccctaactcattttatgaggccagcatcatcctgataccaaagcctggcagagacacaacaaaaaaagagaattttaaaccaatatccctgatgaacactgatgcaaaaatcctcaataaaatactggcaaaccaaatccagcagcacatcaaaaacttatccaccatgatcaagtgggcttcatccctgggatgcaaggctggttcaacacatgccaatcaataaacataatccagcatataaacagaaccaaagacaaaaaccacatgattatctcaatagatgtagaaaagacctttgacaaaattcaacagcccttcatgctaaaaattctcaataaattagatattgatgggacgtatctcaaaataataagagctatctatgacaaacccactttttgatggggttgtttgtttttttcttgtaaatctgttttagttctttgtagattctggatattagccctttgtcagatgggtagattgcaaaaattttcttccattctataggaagtggggtgattacaagggtccagggcagtgggtgagggtgggggtgttcctctatgtctctctgcagcacagctatacatatggccatctgggagcactgttttcttaagttttagcttaggttcaggggtacatgaacctaaggtttgttacataggtaattatataacaggtttgttatataggtaaattacatgtcccaggggtttgttgtgcagataattttgtcaccgggacaacaaacctagcacaggataggcagttttttttacccttaccctcctcctaccttctgcccccacataggccccagtgtctgttgttttcttctttgtgtccatgtgtacttgatgtttagctatcactcataagtgagaacatgccgtatttggttttctgttcctgtgttaattaacttagaataatggcctccagctctgctcttgtccctgcaaaggacatgatcatattatttttaatggctgcatagtattccatggtgtatgtgtgccacatttttttttttacccagtctatcattgatgggcatttaggttgattccacgtctttgttattgtaagtaaagccactgtggaaagcagtttggcaatttctgaaataacttaaaatataattgctatttgactcagcattattgacccactattgacccattattgagtatttacccaaaggaatgtaaatattctaccataaagacacatgcacacatatgttcattggggcactttttttttaatggaaatgtttataactacaagtttcccttttagcattgttttgctgcatctcatcagttggtatttttttgttttcataataacgaaacaaaaaatatcttgtcttgagatattttctaatttctcttgtgatttattctttgacccattggttgtctaagagtatgttttttaattttcatgtatttgtgaattttccagttttcctcctgctattgatgtctagttttatttaattgtgattggaaaagatacattacatgatttcaatctttttaaatttattaagacttgttttgtggcctaatacatgatatatcctgaacaatgttctatatgcacttgagaaaaatgtcttctactactgttgggtggaatgttctatatatgtctgttgggtctaattggcctatagtgttgttcttgtctcttatttccttattatcctctgtttagttgttctatttaatatcgaaagttgactgttgaagcctcttactattattgtagagctatttattttctcatttaattctatcaatatttgtgtcatatacttaggagctctgatgtttagtacatatatgtttataattattatatctttttggttaattcactcttttatcattatgtaatgttctttgtttcttgtaacagtttttgaactaaagtcaatcttgtatgacactagtgttagtatagctactccttctatcttctgattattatttgcagggaatgtctttttctattctttcactttcaatgtgtgcatgtttttagatctaaagtgagtcacttgtagacagaatatagttggatcctatttgttttattcactctggcaatctatgtctttatattgaggggtctaatgtatttacatttaaaacatactgatggggaaggacttactactgtgattttgttatttgtcttctgcatatcttacagcttttttgtccctcattttcttattgcctttctttgtatttggttgatattttatagtgacatgttttgattaccttctcattttctattgtgtattctgtatatattttctttgtggttaccatggtgattacataaaacttcctaaggttataacaatgtattttaaattgattacaatttaacttcagtttcattaaaaaccactactcctttacagctctgcactccctcctttatgttatttatgtcacaaattacatctttttatatcatgtacccatttacatagacatagttatttgttatgctttggtcttttatatcctataaaataattaaaagaggagctacaagcctaagttgcaataacacaggttttagatttgtacatatatttacttttaccaaataactttatattttcatattttcatatggtttctagtcactttctagcaataaataaataaataaatcaaggagaatccatctctaccagcctgtcacagcactaaaagaataccacgcagtccctgcctctttcctaaaatttttttttaaattttggcttttgttgttataactttaccaaaattatttaaagtaactttaccagcattgagttttattgactaaagtcccccggattatttcatgggtataaacccattttgtttcagccagtttgcatggggccttttctttggaaaaaataatttctgaattgctggcaagatggcggaatagaaacagctccgttctgcagctcccagtgagatcgacagagaaggcaggtgatttctgcatttccaactgaggtacctggttcatctcattgggactggttggacaagagggtgcagcccacggagggtgagccaaagcagggtggggcgtcgcctcacctgggaagcacaaggggtcgtggaattttctcccctacccaaggaaagccataagggactgagcctgaggaactgtgcactctggcccagatactgcacttttcccatggtctttgcaacccgcagaccaggagattccctccggtgcctatgccaccagggccctgggtttcaagcacaaaactgggcagccatttgggcagacaccgaactagctgcaggagttttttttttttttttccataccccattggcacctggaacgccagtgagacagaaccgttcactcccctggaaagggggctgaaaccagggatccaagtggtctggctcggtgggccccacccccatggagcccagcaaacaaagattcacttggcttgaaattcttgctgccagcacagcagcagtctgagattgacctgggaccctcgaacttggttgggtgctgtgggggggcatcttccattgctgaggcttgagtaggtggttttaccttcgcggtgtaaacaaagctgctgggaagtttgaactgggtggagctcaccacagctcagtaaggccactgtggccagactgcctctctggatttctcctctctgggaaggatatctctgaaaaaaaggcagcagccccagtcagggacttatagatgaaacccccatctccctgggacagagcccctcggggaagaggtggcttccaccattgtggaagactgtgtggcaattcctcacggatttagaactagagataccatttgacccagcaatcccattactgggtgtatacccataggattataaatcattctactataaagacacatgcacacttatgtttattgtaacactatttacaatagcaatgacctggaaccaatccaaaagcccatcaatgatagactgaataaagaaaatgtggcacatatacactgtggaatactatgcagccataaaaaaggatgagttcatgtcctttgcagagacatggatgaagctggaaaccatcattctcagcaaactagcacaataacagaaaaccaaacactgcatgttgtcactcataagtgggagttaaacaatgagaacacatggacacagggaggggaacgtcacacactggggcatgtcggggagtgggggcctacgggagggatagcattagcagaaatacctaatgtaggtgacgggttgatgggtgcagcaaaccaccatggcacatatacacctatgtaataaaactgcacgttctgcacatgtaccccagaacttaaagtataattaataataataataatttctgggcatgtaagtagctgtctttcaggttctactttgatacatattctgagagaattaaacctgtcaaagaaaccttgactttcaatggcaggcactggaattgaccctaataatgtgttttggggtaagcctactcatattctcaacctgtctgcagtagtcgttagaatctgaacttcctgaagttcatgtgcaaagttgagttaattgtttaatattcaacaaggattatgccagtaagatggtaggaaaatattagatatgtgtcatcactgctggtattatttaaactgcaacatattttagctggctgctgatctcagccaccatgcctgcattttatctctgtctcgtggtctgcaaccttggaagctttgaacttagctcatagaatcctgggcatcaagaacatgtggttctaatggctagatagggaatgagagtaaaaggattttgcccacggtcacgtgagtaaacaacagatttggaggggtctggactactgtgatgacttcattctgacaatatgttccagttgtcctttcatttcctcctaatcacatgtctggtctgatctggctgtttcccaccttccaattcctgccttctccaatgctcccttccgtaggtcactctgtggctcagagaccctgcttagcaagcgcccaacctttcaattatttgttcagtaaaacttgaactcatgtctccccttcttgataaaaagaaaatacgttatgtaatgtcgggttactctataactcttgtcctgtctctcggcaactactgaactaactgttttcatattgagcaaacgtttatggaaggactgccaagagtcaggtactaggcttggtaatattccccgttctctctagtcaaagccaacaccagccagacttgcagatctaggtcccaagcccactgcagatcacaggccagggtctggtctcctctgagctcctttgggagggaaagacagaattattaacacccattttgtagattaggcaactgaggctgaggaagtttaaataactcagacagggcctgcacgtcagtcatattccaaggatccctactcactgtcttctctctacagaacgagatgtctctggagtccatagaaagcccaggagcctggctgggcacggtggctcctgcctgtaatcccagcactttgggaggccgaggcaggcagatcacctgagctcaggagttcaagaccagcctgggcaacatggcaaaaccccatctctactaaaaatacaaaaaattagctgggcgtggtggtgcatgcctctaatcccagctacttgggaggctgaggcacaagaattgcttgagcccaggaggcagcagttgcagtgagccgagattgtgccagtgcactccagcctgggcaacagagcaagattccatttcaaaaacaaaaacaaacacaaacaaacaaacaaaaatagaaagcccagggaccacctgcgtcaggttcccagccacacctttttcttgtcctcctctgtctctggcatcttctcacaggttcctaattgtttgtggttgcacaaattcaaaatcccagaaaaattaccacttcacacccactcagatggctattttttttttgaaggaagataacaagtgttgacaagaacatggagaaattggaattctcacccattgctggtgagaatgtaatacggtgctgctgctatggaaaacagcttggagtttcctcaaaaagttcaacagaatttcaatgtgacccagcaattcccctctaagttatagatctgagaggattaaaaacagttactaaaatacacggactcacatatttctaacagtccaattcacaagggccaaaaggtgctaatagcccacatgtccatcgatggatggataaataaattgtggtctatccatacaatggaatattattcggccataaatggaatgaagtactgacgcatgctacagaatggatgaaccgcaaaaaaaatggatgaacacatgctacagaatggatagcctcactttactatgaagtgaaggccagaaacgaaagtccatatattgcatcatacaaaatatccagaagagggaagcccacagagacagaatgtgcaatggtggatgccagggtctggggagaggggagagtggggagaaactgctcaactggtacaggctttattttggaatgatgggaacattttgcaactagatagaggtagtgattgcagaacacagaatgtactgaattccactgatttttttcaccttaaaatggttaattttcagtcctgagattggataatcataaaaaaatggttaattttatgttatgtgaatttcatccctatacatattttaaacctcagaaatatacactagcaggcatggaacaggtcactgtggtgcctgccaagcccggtgatgttatctggggtccccggccagccttaagcctcttgctgaccggtggagggcagaacctttgccctaaaagtataatatccacatgctggcatgattcctggccagatggcttctttattagcagtaattgaaactgcctcgatacagacactgtaccttgcaaccaaaaaatgactcaacaatgataataagggttaagctgggcctttctctctttgccagttaaattatatttattatagcttgacatgaaaaacaaagcaactccaacaggtatcacaagggcaaaggacatgaacattttatcaaagaagaaatgcagctgtcaaaaatacagaaatattcaaccttgttcataataaagtggctgggctcagtggttcatgcctgtaatcccagtgctttgcaaggctgagacaggaggatcatttgaagccagaagttcaagaccatcctaggcaagtcagttcaataccagacttcatgtctacaaaacatcaaaaaattagccaggcatggtgatgcatgcctgttgtcccagctactcaggaggctgaggcaggagaattgcttgagcctgggaggctgcggtggcggtgagccatgattgtgccattgtactccagcctgggcaatgcagcaagactgtctaaataacaaaaataatagtaaagaaaaggattgggatgccatttcttgcgtattcaatacacagagttaaaagtaatttctacgttttctatttttttattactaaaaaaagctggaccattctcacagcctgaaatgcttctcactttcccttcttctgtccaaacacttctctatgataatgcaaacagtcactcctttaggaagacttcaccccaggtagttccagatccccttatctctgccttcccagaactcctggtgtctctccagttccctccgtgtggtgaagtaccctacctagggtttcagtatggctctgtctgcaaaggtcttgttcacaccttcccttatggttctgttgccctgtgttgtgtcatagcacagggcacagtggagaacccattcacactgatagagagggccccatggtcctggagataaccatgtaaccgatcagaatagggcattgagggctgggtgtcaggcgtgggctgcacttgggtgggcaggtcccctggaaagtcactgggtttggcaagcttcctagtaacatgtctctctggggtccccttggaacttcatgcaaaaatgctggttgctggtttattctagagagatggttcattcctttcatttgattatcaaagaaactcatgtcccaattaaaggtcataaagcccagtttgtaaactgagatgatctcagctgaatgaacttgctgaccctctgctttcctccagcctctcggtgcccttgaaatcatgtcggttcaagcagcctcatgaggcattacaaagtttaattatttcagtgattattaaaccttgtcctgtgttgaccccaggtgaatcacaagctgaacttctgacaagaacaagctatcatattcttttcaattacagaaaaaagtaagttaattgataggattttttttgtttaaaaaaaatgttactagttttgaaaaggtaatatgtgcacatggtaaacactaagaaggtataagagcataatgcttttatactactaagaataatgttttctctaagttttttttggtagatgctttcatcagattaagaaaattccctgctattagttgttgaaggtttttatatcataaatgaaagttgaatattattatcatatattattaatatattgttattgaactatcaaagccttttcctaaaaccattgagatgatcttataaccattctcctttaacctgttgacgagatcattggtatttatactatttctctgttaaccattcttgagtctcaggtttaaattcaacttggtcatggtgtgtcatctttgatcattgctgtctgtggcttgctactgttttgtttaggatttttgcactgatgctcatcaatgagactggcatgccatcttcctttgcagtcctgatttttttctgatttggatcatgtggttatggccctcatggaatgagttgggcatgatgcctttttttcatgtctctggattgatgggacactttggattctctccagatggccctcaatggtccctgcctcctcattgttaggcccctgggcaagcccttctcatttctggtaggcccaggaacctgtgggggttttgtttgtttgtttgtttcttgagtcggagtctcactctgtcacccaggctggagttggagtgcaatggcccgatcttggctcactgcaacctccacctcccagattcaagcaattctcctgcctcagcctcctgagtagctgggattacaggcacccaccgacacaccctgctaatttttgtatttttagtacagatggggtttcacaatattggccaagctggtctcgaactcctgatctcatgatctgcccggcttggcctcccaaagtgttgagattacaagcatgagccaccacacccagtgaacctgtggtttttagaagctccccatgcatgtgaatgctgtgagcatcccaggatgacagccactgtgtgttcagctgttggaactgtgagaaagcaccagtgggaccctctccagcacctgcctgctgaggtcatggaagaggcttgttggggagatgatgccctggctgactcctgaaggatggttaggaatgcaccagatggaagctgggttggacccactctatgctgaagaacagcttgtgtggacacaaggagacacggatatgtcatttttgtagagcctgaggagtgtccaatcacaccatttgcttaaaacatcatgcacacttggaaaagtggactgagaccgaatgaagaagctaacagtggccagatcagaaagggtcttgtgttacttcctagagatacttagattttatcctgtgggtgataggagcagttggagggactgaagacaaggaaagaaacatgtttcaagatctatgtttttcaagacgctttctggtggctgagtagggaattccctggataagtcctgcccagggtcaggcaaaacaagttagggggttactgaaataaggagtatgagaaatggtgtaggttgtgctgacgttttgtaacacatctcatgatgatcttcatttccttcactaatttcctgtttcattaattcccttccacgtgctcttctgaaatttgcctcacattctctgatttctcttttacctgttggtttcatcaccttttactttttgctttcctggaaacacaaatgattctgattgtgacatgtcagaattatttgcaacatttgcctttctgctgaaaccatgagttcactgaatacacaatttagtaaagtgtaggatgcacatgtcgttttcgtggtcacaaccagctctgtagcattttataactacactggcagtgtgctgggaggtgtagagagaaatatttatcacatgtgtggctgacacaacctgccaagttattttaggagcctccttggaatcccagcaagaatgctaccggcacaatttgtaatcacagcatcctgctccatgccttggcttcatggcatagtcacttctgcaagtctctttccagctgtctgttcccatgtctataaagtatgagttaaatcatcctaacactactcatcttacaaagttttcttgctgatgttaagagagttgggaaagaactgtataaactgtgaagtgccatggagatgttagtggttactttatcaagaaatagacactctagaatggagtagaaagccaacagttatgattgagtcctcctcctcttcttctttttattaatttataaagaaaagaggtttaattgactcacagttccatatggctggggaggcctcgggaaactctcagtcatagcaggaggcaaaggggaagaaggcaccttcttcacaaggcggcaggagagagagagctcctgttcttttttgtcataaagtctacagaagtgcttatacttcaggacaagggcaggcagagagaaggaaggacattgcttcaccccagccctcactgacgagtttgctaggggacctcactttgtcccagagtaggggcagaactctggccactacccattcagaaggcctgggctgcactgctagttcctcactaactctgtgtggccttgggcaaggttgggcctgtgttaacagattatgaccctgggctctcaagctagaggatctaaatttgaatcctggctctgctaaagcaattagtgatgtaaactttaatgggtcagttaaccttcctgtggcttagtttgctcatctgtaaaatagggatcataacagtatcaataccacatgattgttggacagattgaatcagttaatgcaggggaagtacttagcatgacacgtattcactatcatttcctggagtaagagctgtgtgtgagtgggtgtgagcatgtgtgaaaccttttctctgcaatctcagttaagaaaccaatccagaatttaaagttcagggcctaaatgggtggttatcttctcccagttccatcctatcccacctttgctcttcctcccgcccacaggagctgttggtccttgattgggctggaagacctggtggaccctaagtgatctataagaggagaatagagaacagggaatgtcttcaaaaatcctagagggacacagaggctgagaggcaggcagtcctgcaggggtcttctgattgggacaaggagaaccttggtcttcacaggccaattctggtcagtttcccccatggacagatgaggaaacaggcccaggaatatccaaggtctcacacttcccatctgtcaagtcttgttgattctgttgtattcatgtctctcaaagggagatagagtttagggaagaaagaaggatcaactgtgtctgataccactgggagcttaagtaaagggttcttttacttcatagcatttatcccaatttgtaattcagtattatttgtgtggctgtttggtgtctctttctcctatatgagtgctagcttcataagggcaaggattttgattctttaatatttagtgcttgccacatgccctgaacacagcaggcatacaggctaaccaacatacagtggcatgaaagtcatgaaagtgagacacctacctcctccagtgccaagagagcataaccatgcacctgtcactctcctcaacaccacccccaagcatgaggcccaaaagcattagctaatcccctcctccagccactaaaacttaaaggccaggtgtggtggctcccatctgaaatcccagaacttcaggagacagcagcaggaggatcacttgaggccaggagtttgagatcagcctgggcaacatagctaggtcccatctgtactaaaaattagctgggcgttgttgcatgcctgtagtcccagctactaaggaggctgaggtgggaggatcacttgagcccaggaggtggaaacaacagtaagctataatcacagcactgaactctagcctgggcaacagagtgacaccctgcctcaaaacaattttaaaaataaataagagcaaaacttagataccacgtggtcaccccaacatgcaaaatcaagttttcccctactgagaagaatggggacttgacagctgagttacagagagataatcttcttcttcttttttttttttggtttacatcctcaagatcatgacttgtgaaatttgaatcgaatacacatgtaattccagagcaatgttgcctccgcataccatcagcaattcacttggctactggaagtcaggataagcttcccagaagagaggtaccacttgggctaccaatataaaaggatgaaaatatcagagtgatggtgttctttacaacgttgagtccctggacagcctgtccactgatgctgatatctgagcctaatgcttctctgaatgttgagattgaactttgatccaatgaaactagaacgagaaagaagataagtctttcattgttgataaggacattatgtttctcatacttgtatgattatttttccttagctgtactataattatctgcttatttgtctctgctctatgtgcttagggtacaaagttgaccaagaccaactttggttggaagcatagtactaagagcacagtactgagagcacagtattgagagcacagctttaaaaaacatgatgaaggctttaatacaggaaatgagcaggggagaggcatgtggtggttggatgtatcttccttgacacagtcagtgcagctctcagtagtcaagtccctacatgttagaagatgttaccttctgtggaattaagtggcagaacttgccttcaattattttcctttgcagaacaacaccaactgcattagttaggacacagtgctggctgcatttaagtcccaagcgatgattagtctctcactgttggtatagattcaaaccaatcagaccacctcctaaagtttgtagggcaggtaaatcctcatcttagaataaaaatcatcttaccaagtatgtgttttagaggcaagaagaaaacatatttgtttctgtaagagttttgtttaaaaaaaatataagaaaggctctcggtttaggtgaggtaatgaagttgttgatagttatcagatgacactggaatctttacttctctgaatgtgttctgtgcatctctcagtgtgggaacatagagagggagatcctccagcaatgccactgatatggtcagaaactgcatctttctttctccctgctgagatgagatggagtcctttgttctagaagacccatggtggtgccgctgggagtaacccttgagacaggaacacaaatcccaaccaatttgtggttgcagccttgagtctcactatttcccatagtgatgcgtagcagggaatggcaggtgcaccagagcaggagaggacctaatatctcccttcctgttagctttttataaagttttattgtgatcagtagcagttgggaagctacttgcagtcactgagcctcagtttctacatctgtaaactggggatagtagcatggcccctacttaatgtgctcagcaaagccactgaaaggagacagaaatgtatctaaattccctggacttttatcctacctctcttggggattgtcaccaccttcccatgtttgtcctttttggtttgatgcttgctgtcacttctttccttaggtgcctctctgtacggctcttttatcccagggattccagagttacagcacatgcataccaccatccaagcatgtttatttgtctcctgcttcactaggctgtccccaaggaacatgtggctcccggcacacacctggcacaacactgcacatgacattcacccacttggccttgaatctgacaaggaatctggcatgatgttcacccactcaggccaggtgccgagcagccctggaggcttaggggccagagggatgggaaaaggtgtctttctggggtgagtatcagtttctgcaggagggctgaatgtgagaaagaataaagagagaaggaagcgaacaagcacagcttaaacatcgcctatttctattgagttttaagaacgctgtgattttgtttgtcatgcaatccattcatcaggccaggcagacacagaacttgggtgtgagtgacgataatgagctgatataattttcacaccctcatcactgagatctctcccatcaggaatgggtcagggagctcacaggtggcagcaactgctattacaggcctcatctctaccagctcctggggcctgccctcctcccattagaaaatcctccacttgtcaaaaaggaagccatttgctttgaactccaattccacccccaagaggctgggaccatcttactggagtccttgatgctgtgtgacctgcagtgaccactgccccatcattgctggctgaggtggttggggtccatctggctatctgggcagctgttctcttctctcctttctctcctgtttccagacatgcagtatttccagagagaaggggccactctttggcaaagaacctgtctaacttgctatctatggcaggacctttgaagggttcacaggaagcagcacaaattgatactattccaccaagccatcagctccatctcatccatgccctgtctctcctttaggggtccccttgccaacagaatcacagaggaccagcctgaaagtgcagagacagcagctgaggcacagccaagagctctggctgtattaatgacctaagaagtcaccagaaagtcagaagggatgacatgcagaggcccagcaatctcagctaagtcaactccaccagcctttctagttgcccactgtgtgtacagcaccctggtagggaccagagccatgacagggaataagactagactatgcccttgaggagctcacctctgttcagggaaacaggcgtggaaacacaatggtggtaaagaggaaagaggacaataggattgcatgaaggggatggaaagtgcccaggggaggaaatggttacatctgtgtgaggagtttggtgaggaaagactctaagagaaggctctgtctgtctgggtttggaaggatgtgtaggagtcttctagggggcacaggcacactccaggcataggtaaagatctgtaggtgtggcttgttgggatgaatttcaagtattttggaatgaggacagccatagagacaagggcaagagagaggcgatttaatagattttatgccaatggctccacttgagtttctgataagaacccagaacccttggactccccagtaacattgattgagttgtttatgatacctcatagaatatgaactcaaaggaggtcagtgagtggtgtgtgtgtgattctttgccaacttccaaggtggagaagcctcttccaactgcaggcagagcacaggtggccctgctactggctgcagctccagccctgcctccttctctagcatataaacaatccaacagcctcactgaatcactgctgtgcagggcaggaaagctccatgcacatagcccagcaaagagcaacacagagctgaaaggaagactcagaggagagagataagtaaggaaagtagtgatggctctcatcccagacttggccatggaaacctggcttctcctggctgtcagcctggtgctcctctatctgtgagtaactgtccaggctcctcttctctgtttccttggacttggggtgctaatcaggcctctctttcccttatctgttttgaagatcaaaaaagatgttcaggccgggcgtggtggcttacacctgtaatcccagcactttgggaggctaaggcaagtggactgcctgaggtcaggagttcaagaccagcctggctaacatggtgaaactctgtctctactaaaaatacaaaaattagctgggcatggtggtgcacgcctgtattcccagctacttgggaggctgaggcaggagaattgcttgaacccggcaggcggaggttgcagtgagctgagatcatgccagtgcacttcagcctgggtgacagagtgaggctgtctcaaaaaaaaaaaaaaaaaaaaaaagatgttcaaggagcagtagcttaagtgttggatgctacaaacatatagaggttattgtagatcttatgcagctctataaaggaataaataagcatcttccccatccatctttagtggcaagaagggttttgggatagcattgattgaggatgatctacttgacaatagtttggacccaaggaggataaggaaggaaagtagtgacggatctcattccaaacttggctgtggaaacctggcttctccttactaaactagaatttggattttacattttcccctttatgttgcagtagaagaggatgaatcctctcactggtgggatcctgccatcctagagcaggtagagagaagagtcactccccactgtgggtagtggaggcttctcacatgtcacatttcacttctacctcaatttcactcttactaagatttgggaatcataatgacaggaaaatagaaaatataaacctcattttaattctttcacagaaaggttagaaattcagtgagttgtggcaacatattttccatcttctgaccttttaacactaattgatatggcttaaattcattctattttaaaccagatttttttggagatagtctatttccaacatgttccttctaggtgacaaatgagggctgttagttcagtatttgttacaataaatgtgtgtaaaataacctcacctttccagaatcatgtcaggaatatgaatctaatgcacaaatgtataactctatgacaagattgcatatatcttttaaaatataccttcccaacgttcattttaatacccctatttcaaacaaacctgcttagcaggttatgttaaacgctcagggcagaggagtaagcaagactgtgagccagtgatgacagcaaaagcatccaggtaggatcaaaatggagtaagaaaatattcctcatccctcagggtagaactccaaagagatattcatgggtcctggccccgtagtggaggtcactcaaaggacaaacatgtttgcatctcatctgcttgaagcctggacacagaggcaccatctgtgtcactctgtgtgtggtctgccatgttgtggggtggtcactacagactcaggcagctgggcagacaataccttagccttagatgatgctgatgcagcccaggagtcagaaactgtagtgcagacaatgccctccttaggccaacacaattaagtgcaatagatgactggcttttctgttagcctcttcattggaaccaaaagcagcattactctaccaaacagaggggagctggaaagaaactacacagtttgcccagcctagcctctgccttgacacggaaccatgtgagtctagacattcacctagatcattccttggggaccaatgctgctgacacattaactcaatagtttgtcctggcctgagaggtcatgtaacttgtagaaagtttagaagcagagattagtgtcatttatttgccatggctgtgacaacaaaggaaggaacaggagtgggaaaacccaaggccaccctggttttggtagatggtgcacacgcttccactaactgttctggggcaaagatccaaatgcactattgggcctggctatgctgcttctgctgggtcccccaaacatgagcctccacgccatttctcagttgtattttaccacatattatcacagtcaccggatttgtacagaatatttggaacctatactgtcttaagggctaccctttaaagaagagaaaacaaggttttaattcaactgtctggaacattttatgtttacttatgtggaatactacatcttttgttataaacaggagggaatgtggacattcgaaggcccctaccttttagctaaaagcccatatgaagcatatggatccatttatacacaccatgcttttcagctacattttcctaatttgcctctctggggccaaccttgtgggactagcagattcatggttgagttgaaggatggtgacctcttccatcagcttttcttcttcctccagtcttccaaccctcagtaacatcagactgggaaggtcttcagacatccagaaaccccagttcggggagttcatacatgacccatcaaagatgagttgcaagcaggcctgccttagggagcaccagccttaatgggttttcctacagagatagttgatgggcagatgcaataaactgactgctttgtgattgaccaccttgagaaaaattagcatgtctggctatgttagtcttttcttgcattgttataaagaaataccagagtctgggtatttataaagaaaagggatttaattgtctcatggttctgcaggctgtacagaaagcatagtgacttcttcctctagggaggtctcaggaaatttacaatcatggcagaaggtgaaggagaagcagacagatcttacatggctggagcagaagcaagagaggctggggagaaggtgccacacattcaaaccaccagatctcataaaaactcattgtcacgaggacaacacctaaggcgggatggtgtgaaacgatgagaaactgcccctaggatccaatcatctcctaccaggccccacctccagtattggggattgcatttcaacatgagattttggtaggggcacagattcagaccatatcactggcactgtgctaatcagatgaatatcaccagttggaaggctagattccacaagaggaggaatgacctggaaattggttctttagttgtgattcttctgcacactgtcattcagggaaatatgagtcaatcatccttcccaataggtcaaatcaaccagatcatctgatcacagagactgaggtgtagctgaaagctgctcacatttctatgaggtcaatggaagccttgagcacagttgtcaatctgtagaaataaggactctgtgactcctccaagacctctctgtgaatgacggtttaagaagaaccagatcctaaaacagggtcagagcttagagggaagggaaagcataaaagcctctgagcaaattctaaagacagggtcaccataggctctcagtgaccctctgtgactgagtggctgcagtgatgcaaaatctcatcatcactgcggaagacaaaaaaatgtcaccctttctacctaggatgagaatccccaaatttggggagaggccacttactaaatagacgtaaaggaacaaagtgacctggaagaattcctgcctgaacctctcaggatcattcacatttgagaacatttatcaaatattcattccaggactgggaccatgaagacttcagctgctttgagctaatcattgtaactttttggtgtctcatggtggaggcaggaaaggacctgatgaacaaatataatcattgccgtcagagttactgttattatttcttgccttaatgttacctcgttctcttgagcattccagttcctcagtcaatgactcatcaacccctatatctataaagtcacaatcgctgtgacttgatttctgtttcactttgtagatatggaacccattcacatggactttttaagaagcttggaattccagggcccacacctctgccttttttgggaaatattttgtcctaccataaggtgagtgtttttgagctcactcttttgcttcttatgattgccaagagcagcttagttccatcagtaaaaatgcttctcctcagggggaaggtctgaagttttacactttcagaaacagtgtgtaggcatcacccagaacatggcaatgtttacccaagggctctcttgctaactctcaggaacctcaggtttgcctcagttgaacagcccaaatctcaggtagatcagcaacctgatgctcagaacttgatgtgcaaactttgtgagcgccataaagaaggttttctttttgctctatgcaggttcccaggaaggtacagtcatacttagttagtattaaaagtaggaaaaggaccccctgattgtgacttgttatctgtgtacatgagagtcaaactttcctctctgtagcaagagctcttgagtagccttttttcccttccttctggacagctttgaaactcaatttattagggagcccaggtatttacctttgggtcatttgcacctgcttcaatcctctccgaaaaatgctaaattccctgagggtatctccatggctctaccccagctcttactccccatgacatcttttgcagctttgagagacagaacaaaggggttctgctttatttcttttccttcaaaggctgcaccttatgggtgagactgatcacagactggatataactgagatgagacagtggtggtcaatcaaactcagatatttaagcacaaaatgagtttgtggggttttttttttacacaaaggcggaatcacatgcaaaatcactagaaaggggatgatttgatgaaattattaaatatttaattttgctgaatagaatataatatgtgccacgtggaccgtgaactttggccgagcctttgtgcctaacctagtctgatgctctgcccagggtctgggccctggatggaaaattaggagcccatgtccacatggccagccgcagcagtcagctctttggcttacatcatctttcccacatacctgaggcttgtttctcagattctaattctctcaggtgagggctttgttgtctaattactatccaggaatttcatattttttccctgtgcaaaagcaataatttccccgccaccttttccaggtcaactctttagtagatgtacccccaagatgcacattcctgggacctttgtttgcacagttaaaatgtcacccctgaaatgtcgatacaggaaggtttgtttttaagtttcagtgaaaactctgagcaagtgttgtaatttgctgtgtccgatgtgtagaggggacattttctcagaacttccatgttaagctggaaaactggaaagtgagttcactttgtcattctgtcactcgttcattttctcactcaacaacatgcctcatacttacctaaatctgctagactaaaggagttccctggtgtctgtaactttccaattctgctagaactctagagcgagctcatgaaataaatgaaaaggatgacaaagagataaaacactgtgcattctcttctgatgctaattcactttcccttggcctcagtttccccatgtgcccctggaggtgatcattcagggattcatgagattttcaagacaacacatgaaaaagcaaaaagacatcagaaagacaaagaggtacttagtatttatacacaaggataagtcattcagtatccacaacacttggagagaattcaagagtgattttaaatttcccttttcaaatacctcctctgttttctcttatttcctttatgacgtctccaaataagcttcctctaactgccagcaagtctgatttcattggcttcgactgttttcatcccaattagaggcagggttaagtacattaaaaataataatcaaatattattttgtttctcctcccagggcttttgtatgtttgacatggaatgtcataaaaagtatggaaaagtgtgggggtgagtattctggaaacttccattggatagacttgtttctatgatgagtttaccccactgcacagaggacagtctcagcccaaagcctcttgggatgaagctcttgtcaacctaactacaaacagagagaagttctctgaaagaagaagatatttatttgggtgtagagtattgcaatgggaatctgcatgcctttataaactatgtgcaaattcagggaagtaaagcaagacaaagaggctccaaggaaaatatgaggaggatttcttatcagttttgaaataattatccttcgctacaaagatcagtaacaagggtgacgcctcaccaaggttggacaggcagttgctgggcaggtgtccttgcagaaatattttttttaatgttgggatggcctttgtgcaagcttgtagttttgcggagtcttttgtgatagttttgttatcaggcacacaagcatgagaatcctctcttcatagccttctttgatttatttgtcagggtttttacacacacacacacacacacacacacacacacaactagtgacatcattttggttctaacaacattcacactggttattgtaaaacttttcgaaggttgtcctaccaaggatcccatgtgtcaccaggtgtcaagttctacagtctgaactaggctgggagcattgtgattacttttctccagactttggtggcccagggactcacagcatcatgctctgtccagtgtctgcctattcccctcttctttttttttttccttaggtgcccttttattacatgtgttgtctcagacccttctaatatgtgctcataaatacatcatatcatctccttcccacatcaattcactttcaattaaaagccaaaactctttcatttagactttggatttaaagtgcttttgaatgaagggttgagagataatagagaaatagattggcaaaccatttatactctgctgttgttgttttttaattttatctgcaagtgtggaacttttcattctgttttgttattaaatttaagccaagactttttaatagaagggtatataagcatttctttgtctataccttcctgctgaatttgaagaaatgctgaatattcttaaccactggcgggctgatggactgtgattttattttattttttatttttagttttttaaattatactttaagttctgggttacatgcatagaatgtgtagttttgttacataggtatacacgtgccatggtggtttgctgcacccatcaacctgtcacctacattaggtatttctcctaatgctatctctcccctagccccccacccaacaacaggccccagtgtgtgatgtttccctccccgtgtccatgtgttctcattgttcaactcctacttaggagtgagaacatgtggtgttgagttttctgatcttgtgatagtttgctgagaatgatggtttccagcttcatccttgtccctgcaaaggacatgaactcattgtttttttatggctgcatagtattccatggggtatacgtggcacattttctttatccagtctgtcactgatggacatttgggttggttccaagtctttggtattgtgaatagttctgcaataaacatatgtgtgcatgtgtctttatcatagaatgatttatgctttgggtatatgcccagtaatgggattgctgggtcaaatggtatttctagttctagatccttgaggaatcaccacactgtcttccacaatggttgaactaatttacactcccaccaacagtgtaaaagtgttcctatttctccacatcctctccagcatctgttgtttcctgactttttaatgatcaccatactacctggcatgagatggtatctcattgtggttttgatttgcatttctctaatgaccagtgatgatgagcattttttcacatgtctgttggctgcatagatgtcttcttttgagaagtgtctgttcatatcctttgcctattttttgatggggttgtttgctttttttcttgtaaatttgtttaagttctttgtagattctggatgttagcccttcgtcagatggatagattgcaaaaattttctcccattctgtaggttgcctgtttgctctgatgatagtttcttttgctgtgtagaagctctttagtttaatcatatcccatttgtcaattttggcttttgttgccattgcttttggtgttatatttatgaagcctttgcccatgcctgtgtcctgaatggtattgcccaggttttcttctaggatttttatggtcctaggtcttacatttaagtctttaatccatcttgagttaatttttgtataaggtgtaaggaaggggtccagtttcaattttctgcatatggctaggcagtttcaccaacaccatttattaaataggaaatcttttccccattgcttttgtgtgtcaggtttgtcaaacatcagatggtagtagatgcatggtgttatttctgaggcctctgttctgttccattgatctatatttctgttttggtacctgtaccatgctgttttggttactgtagccttttagtataatttgaagtcaggtagcgtgatgcctccagttttgttctttttgcttaggattgtcttgtctatgtgggctcttttttggttccatatgaactttaaagtagttttttccaattctatgaggaaagtcagtggtagcttgatggaaatagcattgaatctataaattaccttgggcagtatggccattttcatgatatggagtcttcctacccatgagcatggaatgttcttccatttgtttgtgtcctcttttatttcattgagcagcggtttgtagttctccttgaagaggagaacttcacatcccttgtaagctggattcctagatattttattctctttgtagtaattgtgaatgggagttcactcatgatttggctctctgtttgtctattattggtgtgtaggaatgcttgtgatttttgtaaattgattttgtatcctgagactttcctgaagttgcttatcagcttaaggagttttggggctgagacgatggggttttctaaatatacaatcatgtcatctgcaaacagagacaatttgacttcctcttttcctaattgaatatccatttctttctcttgcctgattgccctattcagaacttccgacactatgttgaataggagtggtgagagaggacatccttgtcttgtgccggttttcaaagggaatgcttctagtttttgcccattcagtatgatattggctgtgggtttgtcataaatagctcttactattttgagatacgttccattgatacctagtttattcagagtttttagcatgaaaggctgttgaattttgtcaaaggccttttctgcatctattgaggtaattatgtggtttttgtcattggttctgtttatgtgatggattacatttattgatttggtattttgaacccagccttgcatcccagggatgatgctgacttgatcctggtggataagctttttgatgttttgctggatttgatttgccagtattttattgaggattttcgcatcgatattcattagggatattggactaaaattctctttttttgttgtgtctctgtcaggctttggtatcaggagatactggcctcataaaatgagttagggaggattccctccttttctattgttcagaaaaatttcagaaggaatgataacagctcctctttgtatctctggtagaattcagctgtgaatccatttggtcctggactttttttggttggtagcctattaataattgcctcaattcaaaacctattattggtctattcagagattcaacttcttcctggtttagtcttgggagggggcatgtgtccaggaatttatctatttcttctagattttctagtttatttgcatagaggtgtttatagtattctctgatggtaatttgcatttctgtgggatcagtggtgatatcctttttatcattatttattgcatctatttgattcttcttttttctttattagtcttgctagcagtctatctattttgttgacctttttcaaaaaaccagctcctggattcactgattttttgaagggtttgttgtgtctctatctccttctgttctgctctgatcttagttatttcttgtctcctgctagcttttgaatttgtttactcttgcttctctagttctgttaattgtgatgttactgtgtcaattttagatctttcctgctttctctagtgggcatttaatgctataaatttccctctacacactgctttaaatgtgtcccagagattctggtacattgtgcctttgttctcattggtttcatagaacatctttatttctgccttcacttccttatttacccagtagtcattcaggagcaagttgttcagtttccatgtagttgtgtgattttgagtcactttcttaatcatgagttgtaatttgatttcactgtggtctgagagacagtttgttgtgatttcttttcttttacatttgctgaggagtatattacttccaattatgtggtcaattttagaataagtgcgatgtggtgctgagaagaatgtatattctgttaatttggggtggagatttctgtagatgtctattaggtcctcttggtccagagctgagttcaagttctgaatatccttgttaattttctgtcttgttgatctgtctaatattgacagtggggtgttaaaatctcccattattattgtgtggaaatcttagtctctttgtaggtctctaagaacttgctttatgaatctgggtgctcctgtatttgggtgcatatatatttaggatatttagctcttcctgttgaattgatcccatcaccattatgtaatgcccatctttgtctcttttgatctttgttggtttaatattctttttaaaataaaatattttaaacatatgaaacattatggagaatggcatgggaaatatccacgtatgcaccacccagcttaacaaatgctctactgtcatttctaaccatggtctctttgaagagctcttttgtctttcaatgtctcttccttgtttggcccacattatccttcatcatatgaagacttgggtggctcctgtgtcagactcttgctgtgtgtcatacctaatgaactagaacctaagattactgtgtattgtacaactaagggattatgtaaagtcaggatcaaagtctggcttcctgggttgggctccagctgtagaataaggctgttgatgtttaatcaactctgtttttttcacacagcttttatgatggtcaacagcctgtgctggctatcacagatcctgacatgatcaaaacagtgctagtgaaagaatgttattctgtcttcacaaaccggagggtaagcattcatgtgttgaaattaaaatactgattgattaaatttatattttgaaattcttatatattcatagacagttgcctaaaaaatgtccaggaaggttccacgtccacttcatcctgtcccccccgaatggtaacatcttgcaatcttgcataactataaatacagtatattcatgttactatatagtacaggaaattgacattgatacagttcacagagcttattcagatttcaccagctttatgtgccctcatttctgttctatgcaaatttatcacaatcatagatttgtgcaatgaccagcatgatcaaaacgcagaacccatttgtgttctatacaaatttatcacatcattagtagatttgtgcaatgaccagcatgatcaagatgcagatccactctgtctccatgtggctccctcctgctatcctacagtcacaagtctttttctctgacagggtccatatcagagcaaactattttttattttgaggtgatcaatgtattaatatttccttttctggattgtacttttggtgccatgtttgaaagttctttgcctagccctccttcctatattgctgtttttttctaaaagtcataaagtttaatgctttactaaatgtagctctattatcaattttgtgttattttttgtataaggtatgagatttagatcaaggttcattttttttgtggcttatggctgtccaattcctccaacgccatttttggaaagatgggtatattgttaaaaatcaactgggcatacttctttgcatctctcacgtactactgtgtcccattgatcactgtgtttattattccaccaataccacactgtgttgaccctagtagctgtacactaactcttaacctcgtgtagagtgattcttcccacttttattgacttattttttcagatttgttttaactcttcctggtcctctgcttttccataaaaattcagaatgagtttctcagtgtctacaaataaacgtgctgttattttgacaagaattgaattaaatatatagaccagtttatggaaaatgtgtatctttactgtttgatctttcaattcatgaacatagtatgcctctccatttccttagattttctttgattgcttttaacatcttgtagttttcagcatagagatcctgtacatgttttgttagatttacagctaaattatttcatttttgttggaatgactgtaaatgatattatgtttttcttgtattttcagatattgattgttgttacatagaaatgtgctttgattttgtgtgttgatctggtatcctagaaccttgcagaactgacatagtagttctagaagtctctttgtatatgccttgagattttacacattgtcagttatgtcacttgaaaatagagacaattcttttatttcctttccaatctgtatgccttttatttcttttcttttgtctattgcactaggacttcccagtataatgttgagtaaatgtggtgaatttttgaattgttcctaatcttaggagggaagccttcagttctttcatcattaagcatcatttagatgaagtgggctgtttttttgtagattctctttatcaaattgaggaattttctctccctagtttgctgagtttttatcataaatgaatgctggaagtactcattataaaaaaaatggctatggaagatgaaagaaagtttcaagcatgttggcttgataggccagttccaagttggcaaaaataattatctcttttttctttctatccatgaaataaaaaattaagagacaagaatgtttatggaattgcattatttcttcaaaatatgttcctagttttaaaggtattacctactattttttttaaaaccatcacattgaggcacttctttttcacgttgcccatgctgcaggagaacataaagacagcttgtctgaggcaacatacaatccaccaaagtcacctgcttgtctgtctccactccgtctctacactgcagaagtgctaggtcttgattctgtttattgtactggaagaacacattctctaccacgtggataatttgcatgtaaaagaagactgggatatagaggctggagacgacatcagggtctcctgaacactgccgccacccccccgccccgccccacacaaatacatcccaggacactgggcatctgggataaatctctattgagcatctagcatagggcccatcacccagtagacagtcactaaatagttgttgaataagtgttcctgtttaacacattttctacaaccatggagacctccacaactgatgtaggacaaaatgtttctgctttgaactctagccttttggtccagtgggatttatgaaaagtgccatctctatagctgaggatgaagaatggaagagattacgatcattgctgtctccaaccttcaccagtggaaaactcaaggaggtatgaaaataacatgagttttaataagaaacttaaagaatgaatctggtggggacaggtataaaataagatcacagtccctttccaaggggtagtccactgaatttgagctgcctaaaaatggtcttttatctttatgtacagaaaacacatcacaaaattcattataaaatgtcacttactgctccatgctggggaaagccatgtccttctgggactagagtctgcacatttaactatgggtggtgttgtgttttgtgcttagatggtccctatcattgcccagtatggagatgtgttggtgagaaatctgaggcgggaagcagagacaggcaagcctgtcaccttgaaagagtaagtagaagcgcagccatggggttctgagctgtcatgaacccctccagctgcctgccatggagctgatattcctgctgttgggttattccagtgaccagacaaaaggagggctgtggtaatgcaacttcaatgggtctcccaagatggggcagctccgatgaggaggtggggcagctggaggaaaaggatcttctcccctgtgcacaggggccagggtttacatatccattaaattgtcaccttggatattctagaagactaaatatatcctttagggggaaaaagtgtgattgtaccaaagttttaagcatggagtgtatgggatggtggaaggggaaggcacttggtatctgttggttggcagtgagtaggttgggagagttataatggagaacttagaataactttgatcatttcatgtttttttctgaggatatcagtagaatactaaatattaaaattcctaccatttctttttcctccagtctcaaagagagagggtggtaaaaacactataggtagggcaagcctattatttgctatctacacttatgcagtaaaaacaggtgtaatctgagtttgtcctgggcagaccagggatatgtggtcactcactatagaaatttccaaatcaaattttgagagatttttttttaaccaggacattattggtcattatattttacaaaaataattctgctgtcagggcaacctcagctcaccacagctggggatagtggaattttccaaagcttgagcagggagtatagagaataaggatgatatttctaggagctcagaacagggtactgttgctttgtaaagtgctgaagaggaatcggctctgggcatagagtctgcagtcaggcaatatcacctgtcttgagccccttaggaagagttaattattctactcttgttctgctgaagcacagtgcttacccatcttgtatcatccacaatcaatacatgctactgtagttgtctgatagtgggtctctgtcttcctatgatgggctccttgatctcagaggtaggtctaattcagttcagtgtctccatcacacccagcgtagggccagctgcatcactggcacctgataacaccttctgatggagtgtgatagaaggtgatctagtagatctgaaagtctgtggctgtttgtctgtcttgactggacatgtgggtttcctgttgcatgcatagaggaaggatggtaaaaaggtgctgattttaattttccacatctttctccactcagcgtctttggggcctacagcatggatgtgatcactagcacatcatttggagtgaacatcgactctctcaacaatccacaagacccctttgtggaaaacaccaagaagcttttaagatttgattttttggatccattctttctctcaataagtatgtggactactatttccttttatttatctttctctcttaaaaataactgctttattgagatataaatcaccatgtaattcatccacttaaaatatacagttcagtgatttgtagtacatttgaagatatgtgtgaccatcatcattttaaactttaaaactttttttgtcaatctagagacctcatacatttttagctatcagccccctgtcacaaaccctgtcatcatatgcaaccactaatcaactttctgcctctatggatttgcctattctggacacttcatagaaatgatattaattcatcagggttttttattctctagttcatgaatttgtactttagtctgtatcattttctttcttctgctggcttcaggcttagtttgcccttcttcgtttactatgttgtggcatgaacatagattactgatttgtgatttttttgttcctctaaatttagacattacagctgtaactttccctctgagcacttcctttgctaaatcccatgagattgtggcctatcacatcttagtttttgttcacctcaaaacagtttctatttgcccttttggtttctactttgactcattggttacttaaatgtttattatttaacttccacatatgtgtgagtttctcaattttctttcccttattgattttatctttattccatgataggtgacagagatatgctgtgttatttctatcttgactacctactatttcttgaacagcaagattaattttgagcttcagattatgatttgggttattctaggagactgtagtccaatagataaaggcaaagagattagggcattgaattttgttccttttatccttcaaaagatgcacaaggggctgctgatctcactgctgtagcggtgctccttatgcatagacctgcccttgctcagccactggcctgaaagaggggcaaaagtcatagaaggaatggcttccagttgagaaccttgatgtcttttactcttctggttggtagagaaaactagaattgctccaggtaaattttgcacattcacaatgaatttctttttctgtttttgttttgtttttcctacagcagtctttccattcctcatcccaattcttgaagtattaaatatctgtgtgtttccaagagaagttacaaattttttaagaaaatctgtaaaaaggatgaaagaaagtcgcctcgaagatacacaaaaggtaaaatgtggtggtagttataggaggatgtttagtttttcataattttttagataatatacatatgatcagtgcagttacctgtatgtttttaaagaatgcttttaacatgaagactgctcatgtttagagcaagagaattcatttggtagaaatgcagaaagtggggtttggggaaggagatatgagaatgagtcagagacagcacatgaaatttgatatcagacacaacaattagtatgccacggcataaattttattgagataaaactttaccactttacttcccttcaataaattgtcagaggataaacattactgtttggaaatatattttactgatattatgctttccccagatcataaattggtaaagactcatttcaagtacaaacctgttattttacacattctcaaatgaaagtccctatcaggccacctgctgaagtgtagcgtgtgttaaatttgagccatctcacatgatagccagatttgtttcaggaaaacatcctgctttccaaggatttagaagggtatgtttttcactggtgattcaggcaacatgcatcagatttctggtcttcaaggagccatattctcagaagggagatcaaggaccacgcttgtgatttacttctgacttcaggagccactttctgtcagtgaaatttctctttttgcttctagcaccgagtggatttccttcagctgatgattgactctcagaattcaaaagaaactgagtcccacaaaggtaaccagagtgtttctgagggctacttgtggggcactcagagggaaggccttgttctgaaaatgtgcaggaagtattccaggatgatgagaatttctgccacatagcagaacgacacatgtttgaatgttataagtggtagttggaggcactttctagaggcatgcaggcatagatagccatgttctaagagtaaagggcaaccctaagcaaacctggcatgctagaaagtcagtctgcggtctgtggatcacctacatcagatcaaatgccaattctcagcctccttcagatccactgaataaaaatttctgcctagaaatttattaggttgctgcaaaattaattgtgggtttttccattacttttaattgcaaaaaaatgcaattaaaagtaatggcaaaaaccacaataacttttgcagctacctaatacatctaacatccaatcaggagccacgctgttccaaaaggggtgattttaactggcagtacttgttgaaagtgtgttcaccaggttaatctactgcaaagttattttccactttggaatggattagtaacttgtggggaaaacctctgagaccgtgtaaatatcctctttgtcttcaatgtttcacctacgagttttacaacccatgtatgttttttactgaagtcactattactatgacagtggcaaaatgatgaccatggtcaattacaagccaccaagacttggcaaccatctcacaaaattcctgaatatttaactattggttctagagagcaggactgggcttactccagcatactgctttaaatatatccatgtctacatccacttttgtctgtatgtctatgtatctatctatgtatctatctagctatgtatctatctatctatctatcatctatctatctatcatctatccatctatcatctatcatttatccatctatcatctatctacttatatattatctatctatcatctaactattcatctatctatcccaatataacttgctgtgataaaggaaatagtctattgttttactgtttcatatagaaatcactagacacatatggctattgagcactggatatgtggctagtgccattgaagatcaattttaaatggtatttcagtttaatttaataaaatttgattttaaatagccactagtgggtagtggctaccatattggacagcagagctctaaactttgagattatagttcaatttcacatcagtatcatcaggttcatgataactgaatactatgattaggtagttgaatttacttataactgcatcacagaagtcttcactggtaaatcacagctctgtcgacctttctcacactcctttcatattggttttggttgtgaattacatggttggagcaggcattatatttatttctatgttccaggtctctaaaggtcctaatccagtcctgatcaaacagaccagtgatggaccatcctgagcttctctcaggagaaaaatcaagaggggcccaacttgtaatcataggagcttatgctattttaatgccatccatcagactacaatcaattaccactcatctagctttttgtccatctctcattcttgtacatcctgagatagtcaattctgagaactgtagcctagatctatcacctgatgcctctcaaagatataatccgtgcttctcaagctaggctatgcacacaaatcactgcatcttgtgaaagttcagattttgaatcagtagttcaagggtggggtttgagattttgcatttctaatgagctctcagatgcttctgacccatggaccacactttgaataccaagaagtggtctgtagaccaatattggtcccttaagttccctcaaacatatcttcgggaaacgtcctttgattttccctacatttaaccattagtgttgcaaattctctcaaagtttgtcaagatatattgtagctaaaataaattacatttttcttgggggagagtactacctcatattaacttacaataaagtacttttaggatcattcaaggaacacacccataacactgagtatgttatgcggaaatgctctctctggaaattacacagctgtgcaggtggcgggggtggcatgaggaggagtggatggcccacattctcgaagaccttggggaaaactggattaaaatgatttgccttattctggttctgtaagatacacatcagaatgaaaccacccccagtgtacctctgaattgcttttctattcttttcccttagggatttgagggcttcacttagatttctcttcatctaaactgtgatgccctacattgatctgatttacctaaaatgtctttcctctcctttcagctctgtccgatctggagctcgtggcccaatcaattatctttatttttgctggctatgaaaccacgagcagtgttctctccttcattatgtatgaactggccactcaccctgatgtccagcagaaactgcaggaggaaattgatgcagttttacccaataaggtgagtggatggtacatggagaaggagggaggaggtgaaaccttagcaaaaatgcctcctcaccacttcccaggagaatttttataaaaagcataatcactgattctttcactgactctatgtaggaaggctctgaaaagaaaaagaaagaaacatagcaaatggttgctactggcagaagcgtaagatctttgtaaaacgtgctggctctggttcatctgctttctattactacaataatgctaagtaaaaaacctccaaaaacctcagtggcatctaacaataagcatttgttgctcacactcatttcacattggttttggttgtgaattacatgtttgcagcaggcaccatagtggtgtgtgatgtccccttagctgtatccacatatggacacaggaatttgctctttttatctctttttattttcttggttacagacatgtgacttttttttttgaaaggtaacaatcactttctcatatgttatttgatgctagtggtcatagcctattagtcacatttgtttcaatgagaaagaaaaaccagtacacggttatgctaaggatttcagtccctggggtgagagccgtctcgaatgtctccccacttcataactcctccacacatcatagttggatagtgagctctgctgatattggcaggacttgctctggtctggctgtagtctgacggagcctggccctgggtgtgctgtgcaggctgactcagctctccccacacctatctcatgttccagtcaggcagtaactggtgaagaagccaagctaggaaccaggatatctggctcctgagctaaagtcttaaaacactatcatattgccttccaaatataacaccaaatactaggtgcatatcacccacactgttttcagacctctgccaaaattgggattctttgtggtatgaagagacacggctttggggctggcccggctgtggcagtgaggtgaacacaaagggatgttcttcagagattacagtccagccctgaagcaacaactaggagactgtttcagcaagtgaggacagggctgtgtggggttctatcctctttataacttccactagcactgaaatcgtgttctctggttacatccaaccagaaccttctttgtcatttttgggatagaaagggactagtttatcctcaaattatttatggagattttatataatatagtgtttctctccacattttctgtatataacaaaagtcctccttttagtgtgtgtatacacatatatatacacatatatatgtgtgtgtgtatgtgtgtgtgtatatatatatacacatatatacacggttatgctaaggatttcagtccctggggtgagagccttcccgaatgcttcccaccttcataactcctccacacatctcagtgggccactgagcacagcaatgggcatgacagttattaaaacactttataaatgcttcgatcctttaccagtatgagttagtctctggagctcctaatacttcattagtactgcatggactgagttaaaagttaattcaaaatctcaatttatccaaatctgtttcgttctttccaggcaccacccacctatgatactgtgctacagatggagtatcttgacatggtggtgaatgaaacgctcagattattcccaattgctatgagacttgagagggtctgcaaaaaagatgttgagatcaatgggatgttcattcccaaaggggtggtggtgatgattccaagctatgctcttcaccgtgacccaaagtactggacagagcctgagaagttcctccctgaaaggtacaaggcccctgggaagggagccctccctgaaccagcctggttcaagcatattctgcctctcttaatctacaggacagtcatgtggttgtataattatttgcttgtatttttatatttagagatttttttaatcatcaaattgattattgtcacactttacaaaccatagactagaaaaaagaaaactacagtcatccacaattccaacaacttacgatgaaggtcatcagttatgtccttatgggtcatcagtgtccaaaatgtaaggactcttttaaaaacacatgatcacaatgctattattatgtcccccaaatgaatatttttttcataaatataatcaaatatttaggaataacattttaataaaaaacatgcatctaatcttcaaagaattttatagcttactggaacagatagacaaagaaagcagtgatgatactgcattacatcggtacagtagcatcatatgcctgtgtaaattatctgacttcaactattctatggaggtgtgggggagaaagagggagagatggagagaagaagaaggaggagaaggagggagaagacaaggtaaggaggagaaggaggagaattagaaaaacaagagaggagatgagaaggaaagtgcaaaataacaattttgaaatagtacaagacaatttccccttctccttcctcatgaccaatgtaagtgtgacttgaggcaggaacctacttttccatcagtcagtcccatcacttatgtgccttttatagtgtggacacatcaccaccctgaatataatttcagtgtttagaaataagtattctttgcaacactatttatctcatctcaacaagactgaaagctcctatagtgtcaggagagtagaaaggatctgtagcttacaattctcatagcaaaataagcatagcaggatttcaatgaccagcccacaaaagtatcctgtgtactactagttgaggggtggcccctaagtaagaaaccctaacatgtaactcttaggggtattatgtcattaactttttaaaaatctaccaacgtggaaccagattcagcaagaagaacaaggacaacatagatccttacatatacacaccctttggaagtggacccagaaactgcattggcatgaggtttgctctcatgaacatgaaacttgctctaatcagagtccttcagaacttctccttcaaaccttgtaaagaaacacaggttagtcaattttctataaaaataatgttgtattaataattcttttaactgagtggtctgtattttttaaaaagaatatgcttgtttaatcttttactaatttgttctctgggccaaagaatcaattaggcccatctgtgatctttaagggtgcttcagttctggagttcaaaagctgtagcatcaaaaacatcatgtaaagcccatgtagattagcatggcataattatctgcagtctccttgaacttgagcaaagtttacattcagtttcaagtcgattggaaagatggggaagtattttgcacagtcatgaagtgtaatgattaccttgttgtgacttttgaatgctgctcttcccaaccagaacttggagaagctttctcatgagagtggctcccaaccactagctgtacattggaatcaccagggagctttaaaaattcatgatgtctgggatatcacagaaattctaaactaatttgcccagagtgtggctttaaaagcttccccattgcttctcatgtgaagccaaggttgagaatgactaatttaaggcatttctggtggatataaaggactaccacagtccaaggccatcctgactgacctcaccttccaggtgcctagctccatccagctgggctccttttcaacccaattataactctattaatgttgttcccagccaggcatggtggctcatgcctgtaatcccagcactttgggaggccgaagcaggcggatcatgaggtcaggagatcgagaccatcctggctaacacggtgaaaccccgtctctactaaaaatacaaaaaattaccctggagaggtggcaggcacctgtagtcccagctactctggaggctgaggcaggagaatggcatgaaccccagggagcggagcctgcagtgagccgagattgggccactgcactccagcctgggtgacagcgagactctgtctcaaaaaaaaaaaaatgttgttccctttctcctcattttgttcttatctttcaagtcctagttcaatccccaagcccctccaaagtgtcttctcctcctagtccagggcccatttacttctctgctctgttattggatactggaggctattatcataaatttgacaatttgccattaaatcattgagttttattctctatattttctttgtatctaaaatgtcttcccccctccattaacaatatcctctcattttattcctttttaaaatatcccagtggtgccttgcaagggactgtatctaatgcaagcatttggtaaatgtttaaggagtgatgtgcagttgatggcttgcatacatatattaagctatttaatgtgaacctttaaacaaatgccattcgtgcatatgcatgtgtgtgtgtgtgtgtgcacatgtgggcatgcatgtctgtctgcagtgaaaatatattcagggtttttgaaaatttttaaataataaggtattatatttatagaaagatttgaaatattttctctgaagaagttaaagaacagacgtcattgattcatattaaacaataccctataaatcttatttctaggtctcatgtatttattattcaattccaccccttaagtaggctttctatataggagaggaagaagacagaaatagtttccatattatttccatattccatattatttgtggctttaggccagcagtgtagctgtattatatgtgcccagacaggggactcagccctgaataaaagtggtcctctggcacacctgggatggggaaggtactccttggtaagctcccaacctggcacttcttgatctccctggcaattttcttgcccattactccatggagatcagaatatcactctgttgtgtcccctcaacacggaaggagtgtctcaataagaatggggctaaaagttgagtccaaacactgtaggaattgagaggttccccacttgcactacccttggaagccaagagaagatgttaaaaaataaaatggtaatgcttcctgaaggtgtcttcccatctttacactggatgggttcaattgggaggaattactggactctggaagttgaagactgtccatataattaaaatgtacaataactacccaggtttaccttgcaagtttcaacatacacaaaattaactttatatgactcttcaaaaacagtttgccatcatacctaataatctggtttaaattttaaaaactcatccattttacttaaaatttaaatcaaaaaagaacacaggtttccatgaatttgtctcaggcctggcacagaatagtactccataaatattttgttaaatgatagatgatgaatgctctcactgtccaatcttcacacatcttatagactaagtataaagaatccaagatttatagtgctgaaagtagtttttatatgtttacaaagcattattgtcattactgcattttttttgcccattactccatagagatcagaatatcactctgttgtgtcccctcaacactgaaggagtgtctcactcactttgatgctatactttctacttttgtttatttaatgcttctcaatatgcttgtttaactgttgcagatccccctgaaattaagcttaggaggacttcttcaaccagaaaaacccgttgttctaaaggttgagtcaagggatggcaccgtaagtggagcctgaattttcctaaggacttctgctttgctcttcaagaaatctgtgcctgagaacaccagagacctcaaattactttgtgaatagaactctgaaatgaagatgggcttcatccaatggactgcataaataaccggggattctgtacatgcattgagctctctcattgtctgtgtagagtgttatacttgggaatataaaggaggtgaccaaatcagtgtgaggaggtagatttggctcctctgcttctcacgggactatttccaccacccccagttagcaccattaactcctcctgagctctgataagagaatcaacatttctcaataatttcctccacaaattattaatgaaaataagaattattttgatggctctaacaatgacatttatatcacatgttttctctggagtattctataagttttatgttaaatcaataaagaccactttacaaaagtattatcagatgctttcctgcacattaaggagaaatctatagaactgaatgagaaccaacaagtaaatatttttggtcattgtaatcactgttggcgtggggcctttgtcagaactagaatttgattattaacataggtgaaagttaatccactgtgactttgcccattgtttagaaagaatattcatagtttaattatgccttttttgatcaggcacagtggctcacgcctgtaatcctagcagtttgggaggctgagccgggtggatcgcctgaggtcaggagttcaagacaagcctggcctacatggttgaaaccccatctctactaaaaatacacaaattagctaggcatggtggactcgcctgtaatctcactacacaggaggctgaggcaggagaatcacttgaacctgggaggcggatgttgaagtgagctgagattgcaccactgcactccagtctgggtgagagtgagactcagtcttaaaaaaatatgcctttttgaagcacgtacattttgtaacaaagaactgaagctcttattatattattagttttgatttaatgttttcagcccatctcctttcatatttctgggagacagaaaacatgtttccctacacctcttgcattccatcctcaacacccaactgtctcgatgcaatgaacacttaataaaaaacagtcgattggtcaattgattgagcaataagcctaaaagcactcattccttttcttttccaaattcttcctttattttcccttcctgaataatttagtcctaaagccattaggtgggtggcagccagatggtggccacacattaaggtagagaagagagagtcatggtggctccaagtcagagaccaaggaggttcatgtggagagacatcctggcctgggtgtgggagtccaagcaagcagagaaggggtcgacgcagaggggtggcttgcaagagcagccagagcctaaatagggtatggagaacccacatgaggcgaggagggcatccatgagtgggaggggttgggtgaggtttggctacataaaggggattgatcaaataagtaaatgtattaaggatgatagaagccaggcttctcacctttgcagaagggagtcatggattcagaaagggagaaaactagcatgaatcctatgaaattagattggaatggatgtaaccgtgtatattcatacccttgtagatagatagatgggtagatagatgatagataggtaacagatagatgacagataatgagatagatagatgtaaatgtatgtctgtatttgtgtgtgtgtacaaaaaacatatattccctacttctctccactgatagggctaggtaacaatgacatttcaatagcaatgaacacacttagtgccccgatcttggcttatgaataccattttccactgaagggaaccagagctctttagagaaatggctgatgccagggcaagaattaagaatgttcaagataagtttaggacacattttgtgccaggaagcaagaaaattttcaaataatttccaagtaatctttggaaatgatacttgaaaatgacttccaaatgacatttccaaatgacttgcaaacgatttccaaatgatatttggaaaaacctaaagactccatcaaagaactattggaactgataaacacattcagtaaagttgcaggatacaaaatcagcatacaaaaatcagtagcatttctatatgccaatagtgaacaatctggcaaaaataaaaaagtaatcccatttacaatagccacaaataaaactaaatacctagaaattaacttaatcaaagaagagaaaggtctctacaatgaatactgtaaaacattgatgaaaggaattgaagacacaaaaaaggatatttcatgtttatatattgtgagaatcaacattgttaaaaatgtccacactactcaaagcaatgtacagattcaatgcaatccctcaaaataccaatgacattcttcaaataaatagaaaaaaatcccataatttgtatggaaccacaaaagacccataatagccaaagctatcttcagcaaaaagaacaaaactggaggaatcatgttacctgacttcaaattatactacagaggtacagtaaccaaaacagcatggttcttgtataaaaacagacacatagaccaatgaaatagaaaagagaacccagaaacaaatgcaaacacctacagtgaactcatttttgacactgctaccaagaacataccctggggaacagaacatctcttcaataaatggtgctgggaaagctggatatcaatatgcagaagaatgaaactagacacctatatctcaccagacacaaaaatcaaatcaaggtggattaaaggctgaaatctggctgagcagggtgactcatgactgtaatctcagtactttgcagaactttgagaggtcaaggtgggcagatcacttgaggtcaggagttcgagaccagcctggccaacatagtgaaaccccatctctaccaaaaaatacacaagttagctgggcatggtggtgcattcctgtagtcccagctagtccagaagctaaggtgggagaatcatttggacctgggaggtggaggctgcagtgggccgagatcattccaatgcacctcatcctgggcaacagagtgagacagactgaagtctaagacctcaagctatgaagctgctacaagaaaacattgtggaaactcttcaggacattggtctgggcaaaaatttctgaagtaataccccacaagcacaggcaaccaaagcaaaaatggacaaatggaatcacatcaagttaaaaagcttccgtgccgcaaaaaaagtaatcaacaaagtgaagacacaaaccacagaatgggagaaaatactttcaaactaacattctgacaacagattaatagccagaatatataaagagctcaaacaactctgtaggaaacaatctaataatccaatcaaaaaatgggcaaaagatttgaatagatatttctctctctcttttttttaattttgagacggagtctctctctgtcgcccaggctggagtgcagtggcactatctcggctcactgtaagctcctcctcctgggttcatgtcattctcctgcctcagcctcccgagtagctgggactacaggtgcccgccaccatgcctggctaatttttttgtatttttagtagagacggggtttcactgtgttagccaggatggtctcgatctcctgacctcgtgatccacccgccttggcctcccaaagtgctaggattacaggcgtgagccaccgcgcccggcctgaatagacatttctcaaaagaagacagacaaatgccacataggcatatgataaggtgctcaacatcattgatcattagagaaatgaaataaaaaactatagtgagatagcatctcaccccagctaaaatggcttttatccaaaagacaggcaataataaatgccagcaagaatgtggagaaaaggaaacccttgtacactgttggtgtaaattagtataaccactatagagaacagtttggaggttcctcaaaaaattaaaagaaagctaccataagatccagaaatcacagtgcttcggtatatacctgaaagaacggatatccgtatactgaagagatatcttcacgctcatgttcacaatagccactactcacaaatgctaagatgtggaagcaacctaagtgtccatcaacagatgaatggataaagaaagtgctccacttatacacaatggagtacaattcagatacgaaaaaagcatgagatcttgttatctgtaataacatggatggaactggaggtcatcatgttaagtgaaataagccaggcacagaaagacagacattgcatgttctcacttatttgcaggatctacaaatcaaaacaattgagctaatgtctgggtcttagtcaattttgtaccctaagtactgtgagcacagcttttaaaatacatgatgaatgctttaatacaggaatgaatagataagaggcacagggtgcctctgggtgttcttctgatacatagtatcttccttgacacattcagtacaactctcagcaggtaagtctcttcatgttatgttaccttctgaggaattaggtggcagaacatgccttctactattttcctttgcagaacaagaccagttgcattagttgggacacagtgctggctacatttgagtcccaagcaacgattagtctattgctgagagtaattagtctatttctacagacttagaggggatgacacacaggggcccagcaatctcacccaagtcaactctgccaacctttctggtcacccaccatgtgtacagtaccttgctagggtccagggtcatgaaagtaagtaataccagactgtgcccttgaggagctcacctctgctaagggaaacgggcacagaaacccacaatggtgctagagaggaaagaggacaataggactttgtgaggggataggaggcacccagaggaagcaatggttacatctgtgtgaggaggttggtaaggtaagactttaacagaaggggtctgtctgtctgggcttggaaggatgtgtaggagtcatcgagggggcacaggtacactccaggcagagggaattgcatgggtaaagatctgtaggtatggcttgtggggatggatttcaagtattctggaataaggacagccatggaaacaaggacaggtgagaggagatttaacagatttcatgccaacatggcacatgtatacatatgtaacaaacctgcacattttgcacatgtaccctaaaacttaaagtataataataataaaattaaaaaaaaatagagttcataccaatggccccacttcagtttctgataagaactcagattccttggactccctgataacactgattaagttgtttatgattcctcatagaacatgaactcaaaggaggtcatcaaaggggtgtgtgtgattctttgctactggctgcagctgcagccccgcctccttctccagcacataaacatttcagcagcttgtcctaagactgctgtgcagggcagggaagctccaggcagacagcccagcaaacagcagcacacagctgaaagtaagactcagagaagacagttgaggaaggaaagtggcaacggacctcatcccaaatttggcggtggaaacctggcttctccttgctgtcagcctggtgctccactatctgtcagtaactgtccagattcctctcctctgttaacttggacttggggtgctctcaggcccctgctcccttatctgttttgaagatcaaaagagatgttcaaggaggagtagattaattgttggatgctacaaacacataaaggttattattgatcttatgcagatttatgaataaataaataagcatttgtcccagctaccttctcattttggtaactaggagggtttagggacagcatttggtagtgggaatgatctgattaggttagatttgacctatactaatcaacaaaaacccagcaaaggcagattacaaactgctgaacacgatggggagtgtgatcctcatccccttcccaggttctcaggattctggggacaggagggagcagcttgggtttttgtctcattaccttcattttctgggttctctgtctgctggaagagatgtgtagaagtttgtcccctgtggacctggtggttcctgctcccccaacttccaccccaggatatcatttacataacgcaccggggaacaccaagacttcacgggaagctgtcccccggctcttccctctttcctgtgccatgtcccaaaacatcccctcccacctatgactcactcctccaccctgtcatacacagaactatttaccttgcaatgattaatctccagagcaaaggagacttggaggaagttttgaagatttattctttgctttaatctttttcctcccgtctctgggaggctagcattaatatagagctttgtttctcacctaatgggaatctgctagcagcctgaaaaggcaggagctgtgaaagccaatttggattttacacattttttcccctttgtgttacagtaaaggaggatgaaccctctcactggtgggattcctggcatcctagagcaggtggagagaagagttacttcccactgtgggtagtggaggctccacctgttccattaacttctacctcaatttgacttttattaagagcagggaaccacaatgacatgaaaatagacactataaaactaattttaattctttcacagaaagcttaggaattcagtgaatagtggcaacatagtttccattttctaacattttaaaataaattgatatggtttaaattcattcatttttaaaccagaattttttggagatagactatttccagcatgttccttctggatgataaaagagggctgttagttcagtatttgtgacaataaatgtgtgtaaaataacatcacctttccagaataatatcaggaatatgagtctaatacatgaatgtatatctctaagacaagactgcatatgtctttttaaatatacatgcctgacagtttattgtaatacctcctttttgaatatacctgcttagcaggctaccttaaactctcaggcaggggagtaagcaatactgtgagctagtgatgatagcaaaggcatccagataggatctgcatgaagtgagaaaatattcctcagctctcagggtagaactccaaagagatattcatgggtcctggccccacagtggaggtcactcaaagggcaaacagattggcatctcatctgcttcaagcctggatacagggacatcaaatgtgtcactctgtgtgtggtctgccatgttgtggggaggccactacagactcgggcagctgggcagacaataccttagccttagacgatgctagtgtagcccaggaatcagaaactatagtgtagaccgtgccctccttaggccaacacaattacatgcaatagatgacgggcttttctgttagcctcttcattggaactgaaagtggcattactctaccaaacagaggagagctggaaagaaactaaacagtttgcccagcacagcctctgccttgacatggaaccatgtgagtctagacactcacctagatctttccctgggggccaatgctgctgacacattaactcattagtttgtcctggcctgagagatcatgtaacatgtagaaggtttagaagcagagattagtgtcattaatttgccatggctgtgacaacaaaggaagaaactggggtgggaaaccccaaggccaccctggttttggtagatggtgcacacacttccactaactattctggggcaaggatccaaatgcactatatgctgcctctgctgggatctccaaacacgaccctccatgccatttctcagttgtattttaccacatattatcagagtcactggatttgtacagaatgtttggaacctatactgccttaagtgctacctgttatagaagagaaaacaaggtcttaattcaactatctggaacattttatggttacttatgtaaaatactgcatcttttgctatcaacaggaaggtacatggacattagaaggcccctgcctttcagctgaaagcacatatgaggcatatggatccatttatatacaccatacttttcagctgcattttcctaatttgcctctctggggccaaccttgtgggactagcagattcacggttgaattgatggctggtgatgtctgccatcagcctttcttcttcctctagtcctccgctcctcagtaacatcagactgggaaggtcttcagacatccagaacccccagttgggggagtccatacatgacccatcaaagatgagttgcaagcaggcctgccataaagagcagcagccttaatgggttttcctacagagatagtcaatgtacagaggcaataaactgactgctttgtgattgatcaccttgaaaaaatgagcatgtctggatatattagtcatttcttgcattgctgtaaagaaatacctgaggctgggtaatttataaagaaaagagatttaattggctcatagttctgcaggctctacaggaagcatagcgacttctgcctctagggaggcctcaggaaatttacaatcatggcagaaggtgaaggaggagcaggcggatcttacatggctgtagtagaagcaagagagggtggggaggaggagccacacacttataaaccaccagatctcataaaaactcattgtcacgaggacaacagcgaaggcaggatggtgtgaaaccatgagaaactgcccctaggatccaatcacctcctatcaggccccacctccagcatttggggttacatttcaacatgagatttgggtaggggcacagattcagaccatatcactggcactgtgcttatcagatgaatatcaccagttggaaggctagattccacaag

SEQ ID NO: 663 - DNA, 208648 bp, Homo sapiens
  misc_feature (1)..(208648): n=a, c, g or t
ttgctggtgtatggctatggttcttacggcgcaagtattgatgccgatttcagttttagccgcttgagtttgttagatcgtggctttgtctacgccattgtccatgttcgcggcggtggtgagctggggcaacaatggtacgaagacggaaaatttctgaagaagaaaaatacggtttaatgaatttatcttgatgcctgcgatgcattgttaaaactgggctatggctctccttcgctttgttatgcgatgggcgggagtgcggggggcatgttgatgggcgttgcaattaatcaacgcccggaattattccacggcgttatcgcccaggtaccgtttgttgatgttgtaacaacgatgcttgatgaatcaattcctcttaccactggtgagtttgaagagtggggtaacccgcaggatccgcaatattacgagtacatgaaaagctacagcccgtatgacaacgtcaccgcacaggcttatccgcatttactggtaacgaccggtttgcacgattctcaggtgcaatattgggaaccggcaatgggtcgctaaattgcgcgagctgaaaaccgatgaccatcttttattgctctgtaccgacatggactcaggccatggcggtaaatctggtcgctttaaatcgtacgaaggcgtagcgatggaatatgcttttctggtcgcgctggcgcagggaacattacccgctacgcctgcggactaagtattttccagataatgtttcagtgttaaacgcagctccgggctcatgctgtccaggttattaaataaccagcgcagatagcccggatcgcgttcggcaacgtcggaaaccgctttgccacggtatttgccaaaggtgaaggatcgctcatcaacgacggacgtccggtgatatcggccatctgttctgccgtccacgccggaggtgttcataatatcgataagcaactgcggcggtgatataacagtcatacaacgcgcggtgatgatgcaggcccggcggcgtctgtacacttgagcttgcgtgttttatataacgccatattgctgtactgatcccagccacaaacgagcggggtaccgagctgattacaggcgtgagccaccacactgggccagattattttatttgtattactctttggtctgttcctcaccattcccctcttcccccaacccctacctcatgcccgggaccttgtcgtctgcaccatttccccagtgcctggcacttgggcagtgctcacaatccagttgccgagtgaatggataaatgtggtctccaaacctcacaccaccccgaaaggctgtgtgttctcattcccatttatagaggaggaaactgagggtctgagaggtttacatcgaagtttggttctcgggctggcaaaagcagcaacatcgccctggagctctttagaaacgcagattctcagggcgtgggtccagccaccagtgcttccaccagtgctgcaggcgatgtgggggtgtactgaggctggatacacaaggacacgtatagcagcgagagccggaactcagagccctagctccttcacctccccaccccagcccaagacaaggcaggcaatgcccacgatccactgtgccccatggcaggtaagcccccatcctgctaaattaggcacctggtgcctcccacccccgagagctgggcagctctccaggagccccagaaggaacaataccagattagaggtttcgagtcagcctcgaggcaggattgattgggacaggatgaatatatggcaacaaacccgtgggatgcaggcgtgcgcttctcaaaaggagtaatgaataaatgtgaacgaatgcacaagactcagctcacatactaattacctttgctgccagccaggctcctagaaatgtgactcactcagatgctcttaaatatactgcatctctctctctctcacacacacacacacaccacacacacagacacacacacacgcgcatgcacgcactctgcagaggggccagaagcagctagcaggtggaggaacagcacactctatctctccacgtgctggggcctgcagaggcgaacacaggcaggtaccgagctgattatacattcttgtggtgaaaacaagcatcgtggtacccagaaattattcggcaatcgtccgaggcgcatttgattgagataattaaggtaatcccggcggggaatttcgcaggcaccaagcgatgctgtgtgatcgttaaggacctggcagtcgataagcttaccgccatgaccgataaattcctcacagaataccagaagcgccgttttagacgcattttccatccggactgaacatggactcgccacaaaatagcgttcccatgggccacgccgtacataccgccgacaagctcatcttcacgccagacttcaatggagtgggcatggccgagttcgtgaaggcgatggtaggcttcgaccacagccacgcgtgatccaggttccttcttcgcgatcgctggacacagccttcaatgacctgaccaaaagcgtaattcatcgtgacacgatagggcgagcgtttatgaaatcgcttcatactacggctgatatgcagtgattctggccatagcaccgcgcggggatcgggcgacaccagaggatggggtcagcctggagaaaaccacggaaaataccacgctggtaagccattaacaggcgcgcagggctaagatcgcccccaagtgccagcaggccgttaggctcacgtaatgcgccttccggggaagggaaggctattgaatggcgagaaagctgaaccaggcgcatgaccgcaaaactccacgcaagtcggatcgttcaataatagcttacaaaccctgcttgaactggtaataacgcccctgtctggcaagcagttctgcgtgagtaccttgctcaataatttgcccgttgtccatcactattatttgttggaaacgagagagtccgcgaagtcgatgggtgaccattaacaccgttttctcacgcatcatttctgccaagcaattcaaggatctggctttcggttgtggcattaagccttcggtaggttcatccagcaacaccagtggcgcatcatgtaacagcgcacgggcgatagccagacggcgcagttcaccaccggagagctggccgctcccccggcccttcacctaaccaactgttgagacctgcatcctcgagcagcttttcaggccaacgcgacgcaagatctccgacaagagcctcatcactactgccaggcgaggccgagtaaaagatatcacgcagcgtgcgctaacaatcactcgtggccaggattagcccgaacaatcagctcggtaccccattacggtggcgttatctttataagcagagagaacgtgatctggcgtggtttcgaaagtatttttgatcatcttgaacagcgatttcggctgctgttcaccatcgataacccagtcggcgttaaaaattttgtggcggcagtgctcggagttcgcctgggcaaacatatacagttcgatgtcgttcgggttacgaccaagctttgtgaaagcatcctgcagatagtcaatttcatcttccgccagagccaagccaagacgcaggttagcgtcgatcagcgcctgacggccctgccccagcaaatcaacgctggtaaccggagtcggttgatggtgggcaaacaactgctctgcatcatctaaagcaaaaaagaccgtttccatcatgcggtcgtgcagttcagcggtaacctgctgccattgttcattggtcagcgtaccggcttctatatagtaagcaacgccgcgctcaaggcggtttacctgttgtagcccgcagttatgggcaatatcggtcgctttcgaagaccagcgagagatggtgccaggacgcggggtcaccagcaggagtttgccttggcggggcgtggctggcgagtgccgggccatatttcagcaggcgcttcaagnttgtgcgtgctcatcatcgtttaacggcgcattgaggtcagcaaaatggacatactcggcgtaaatattgtgaaccgggagcctggcagcctgaaaacgtgccagcagtttgttgattcggaatgccgacagtgcaggcgaaccacgcagaatttccatcataagtctctcgtcttctaagctttcggtgtacccaggggggaaacgggcgtcattataaagaatctgatgcgctgacaaaccgtttgcgtggaaataaatcaccctcgtggattataaagcgtgccggccatagggtgtttataagttggctctcgggccgggtttccaaaaagtcggcctattttgttaaccctttccttatttactttcatctgggcaacagactgagaccctgtctcaaacaaacaacgaacaaatgaacaaacaaacaaacaaaataaccacataactacctagcaacgtagcctagcaattgagatgggggcaaggaagggtaggaaccaggtcctgtgagaatcagctagacttgtggctttgggctcggtgctcttcctttggggacgtcagcagccccttcttgaaaacgggttgcaactcgatttgttgttggcttcacctcctctctctgtcccagacctgagccctgtgatctggggaggaggacaacgggacaacctgtttgcttgttttcccatcactctcagggattgaatcacagtggagccaggaagatggggagagtccaggcttgctgctctcccatcctcagagcagcagcaggccatccatcacctgtcgcctgtcctcagagtgatcagccaaggcctggggcggctggggtcaggtcaggcagggcgtgggtgggagctggcagggctggctcctccaggccacttcgtgctgagtcactgagtcggccaatcctccccagctggccctgctcccactccatgactcagatgtctattccagccctggctgcttggtggggctcctcccatctgtccttctggctctggggctgccgaggcttttgggagcctgggcagggctgaccaagactgccagagctccggccggtccccagtctcctgccttttttctcattggcactgagtctgtggtttaggtttgggggaggagggtcttgtagataaggggatcaaggccaaaggagatcatttattaggtcccagcgttgaaagcaagaggtccttgggaccnagttgganatggctcgacaatancccccgagaaggctttgacttagaaaagttgcttgggggattccatccaaaaggggaggggcccaccgttccaagatttcccgccccccgaaagagggagaaagccgccagttaaagcggcccaaaaaatggggggtgttttttttcccccaaaaaaaagaaaaaggaaaaaccgcccagggattacccgagaatttatttagttagtcgccagactgaatgcgccgtataattcgcttttccgggatcataggtctgctcaagccgtaattgatatttgtcaattttaacatctttttagggagcaagtaagtctaagcaaaccttaacagcagagaattccgatattagatgtaaatatatgtctatctatttgaaaacccttaagttgttaagggtaactttacataaaagtgtgaacaagctggcacaaattgtttaatgtttacagcaaaagataaccttcatggcgcaataaccactcttttcgctgaactccgcctgcatatccggtcatggtgccgtttcggccaataacccgatggcaaggtacgacgatgctgatgggattcgatccgtttgccgcaccaacggcacgcgccgcgccaggacggcccaattgctcagccagttggccgtaatgcattacctgcccgcaggggatagtgcgtagtgttttccagacttcgcgctgaaatggcgtcccccccgtagcagtgggaacgcgtatcaataatgctaagattaccggcaaaatattcacgaagcttgtcgcttaaaccgcctggattggtggcagaaatgcgctcatagccttctttgcgataatggatgtccagcagctgcaccatgcgttcgctgtactcttcccattcaaccgcccgcaggcgaaattgctcatcgcaaatcacccacagtgggacccagtggcgtggcaattttttcttcaagtaatctcagcatccgttctctcttaagacaaacgtgggtaaatacccggacctatcggcagaccgacaagataccacgccagcaacatcagcagccataccaccaaaaagataagtggatagggcaagactaacgaatagtaagtacccagtttcgcgtctggtttgtagcgttgcaggaatccaagaaacagtggaacaaaaggagataccggcgctaaaggcaatacggatgagtcggaatacgaaagaggatttgcgcaatgcgggtttcagacccattaccccctaaaatgaactcctcaccttccccaaacctgcttccatctggtgacttcctcatccaccttggtgtccccagatgaggaagcaactccgtgacttccttcttcctttaacattaacccagcacctaatatgtgctgggcagtgtgttaaatgctccaggtacattttccagtttgcacaaatgggatatttgctttcagctgggagacattgggaaaagcacttcatagctcagtctcagttttcccatctgtaaattgggactggtaatactgatctctgagttgttgtgaagtttgagttaatacatagaacatgcttagctcatagaaagtgctccagaaatgtttactaatgcttttattatttgcgttttcactctcacaacaacccctaagtgaggtgctagtactatcccattttacagatgcctcatcaggccccttcactgaatccctttcctccctccctctgaacctacagaggcttcctccctgtcctctccttgtcccctaaaaagcagtggatcctgtctcaccagctccaatctgctctcctgtgatttttttttttttttttttttttgagacagagtctcactctgttgcccaggctggagtgcagtggtgtgaccttagatcactgcaacctccgcctcccagattcaagtgattctcctgcctcagcctcctgagtagctgggattacaggcacctgccaccacacccggctaatttttgtatttttagtagagacagggtttcaccatgttggccaggctgctatgaaacttctgacctcaatcacccccctcggcctcccaaagtgctgggactacaggcatgacccaccatgcccagccatcctgtgacctttatcagcatgaatgacactgcatgtcattcccctgctcaaaaccttctactattccagcttcccttggggtaaagtgtgaattcctgagcttggcattcaagctctacccaanccaggcctggccactcccctctcattcatgtctgcagctacacatgtgggcatgctctcgcgggcctgtgttgactctgctttattttgacccctttatccatccatcatccatcctcaatcccatccctccatctctcttccaccccattccattcatccatccattcatctgtctatccgtctctcgtttcttcttccctattcatccatcaattcactaatcctttcattcatttattttctcccatccatccatccagtccatccttccctcatccatccttccattcatcctccatcttatccatgtgtccattctgttatccatctcccatgctgttatccaccctccatcctttctctcttgctactattgcatcctcagtgtctgacacatggtgtgggttcaacattatttgtttaattaatgatggaaacatgtgggtcaccccactgtatgccaagtacctgtttagggcatccggaagtatagaaattaaagagtccttgctccagtgtgcccatcatccggtctaggaaacagtgcaattgagtaaatgtaatacagtgtgatgaacaatgctttatttatttatttatttatttatttttgagataaagtcttgctctattgcccaggctggagtgcagtggtgcgatctcagctcactgcaacctccacctcccaggttcaagcaattctcctgcctcagcctccctagtagctgggactgcaggtgcctgtcaccatgctcggctaatttttgtatttttagtagacacgggatttcaccatgttggccaggctggtctcaaacttctggcctcaagtgatctgcccaccttggcctcctaaagtgctgggattacaggtataagccacagcacccagccaacaatgctgtttattatcaaggtctggacctctggcaattaagggaagcaaggcagtgctgctcatgctgcctgggatttgacagaggtaataagagaagacctcatggaggaagggatacttgcatggaagcttgaaggatcaataggagttcaaggaaggggaacactccaggtaaaccacaccaagtgggtatccaaaacatagaagctcatggagctcacagaccatgtgccccctggacgagaggcagtgatccacatgttggctaaacctgacaagcaagatgagagggaagtagcagacgggtagggaaacgaccacagagatcatctctttaaaactatgaaatacaaaacatggtggtacaaacctctagtctgactactcgggaggctgagcggggggattacttgagcctaggagttcaaggctgcagtgagccatgatcatgccagtgtactccagcctggtgacatgggcgacaaagcaagaccctgtcctcaaaaaaaaaaaaagaaaagaaaaaatattaatactagctccctggggattgtataggagatgggggttctaaggctggctggggcctgtcggggaaatggtgctcctggtgggaggcacagcgggagaaccggtgaggtctgcgtggtggtcccatctgccatgggcatgttttctgggagcctcgcctggccttgcctcaacccacccctcccactgggggctctctctgcctccctctccctcatgtgtgctacaggtgaaggccacagtgcacctggcctacctgcgtgccgtgggcacccctctctgcctctacgcactcttcctcttcctctgccagcaagtggcctccttctgccggggctactggctgagcctgtgggcggacgaccctgcagtaggtgggcagcagacgcaggcagccctgcgtggcgggatcttcgggctcctcggctgtctccaaggtacgcctcacctgccctcctcatccctctcctcccagctgcaccaaggggtgctcaggactcctttaccccacccctccctgggtcaccctgtccccctggaacagtgtgcaaaacgtctggggtccaggcaaagatctgtgtccttaagatgaggctggagggaacgggaaggacagggcacatccctccttttctggaagcttcagaacctctcccagtccctccccactagcggaaggcgtctgcaaggcctgcctgctggtggctttcagtgcctgcccccaaacctccagacagagccagaccctccctaacaaatgcatcaccgctatcactccttcttctcctcgtcaaaaatggaaagacttcttcttgaaataattgtagattcacatgcagttctaggaaataaggcagccagctaccttgaacagtctgcccagtttctcccattggtgatatttatccatgcttaggtgactctgaggatcccacccattcatccatccatccacccacctaccaattcatccacccatccaccaacccaccaattcattcatccatgcacctacccatccactaattcacccatccaccctacccacctaccaattcattcacccatccatccatccatccacccacctaccaattcatccacccatccagcaacccaccagttcattcatccatccacctacccatccaccaattcatccatccaccctacccagctaccaattcattcaccctatcaatccatccatccacccacctaccaattcatccacccatccagcaacccaccagttcattcatccatccacctacccatccaccaattcatccatccaccctacccacctaccaattcattcacccatcaatccatctacccacccaacagttcatccatccatccaccaaccaatccatccacctgtctatgtatccatctacccaaccaactatccatccatgcatccacccatgtctccctctctttgtaattatttttaataggtaatatatttgtgtgctaaaactctttcaaattactcaaaaaggtatacagtgaaaaatatgtctttctccccaaattaacagccccccattgctaccctacaggcaagctaccattgctaacatcttacattcttccagatatattccaaatacgacctattttgttgccacaaaaggcactacgatactccattctataccttgcttttttttacttagctaatattaaaaactgaacttttttttttttttttgagacaaggtctcactctgttgcccaggctggaatgcagtggtgcaatcatagctcactgcagcctcaacctctcaggctccagcaatcctcccacctcagcctcctgagcagctaggaccacaggcacacaccaccatgcccagctaattttgtatttttagtagaaatggggttttgccatgttgctcaggctggtctcaaagtcctgagctcaagcgatccactcgccttggccacccaaagtgctgggatcacaggtgtgaaccaccgcacacagcctttggaaactatctttatcagtaacatagatgtgttttattcttgatatttcttttgaacaaagaggtacaagggacaagtcttctcattccattccctatggccctcccctcagttcctctctctagaggcaatgatcatgggttgcttatgtcttctttcagaaaatattttatacaaaaataaagtaaatatagtttgagacagggtctcagtctgtttgcccagactggagcgatctcagctcactgcaacctccgcctcccgggcacaagcaattctcctgcctctgcctcctaaatagcagggatcacaggtgctcaacaccatgcccagctaatttttgtatttttagtagagatgggatttcaccatgttggtcaggctggtctcaaactcctgatctcaggtgatctacctgcctcggcctcccaaagtgctgggtttataggtgtaagccaccacacctggccttgaacaagatttttaaaagcacttagcatcactgaattgcatacttaaaatggttaaaatggcaaatcttaggttacatatatttaaccccccaaaatgcaacattaaaaaaaaaaataaggctcttgacaccatgccaagccttcagaacatctgtgcatacatcagtccccttcctctttcttgctggtaatacttgaacaggatgaaggcagagaagcagcttaatctgatgtcctgtgaggcctcatgcacacttcacccttatgcaagacataatatacgtgccacatgtactgagcacctccccatataacacaacaataaattaccactacaggcccaccgtgtgcctggctgtgtcttaggcactgaggttacaaggtggatactgccacgtgaagcctctagcctaacacaaagccattatttagccaagaccctcccattcagcagttacaaccaagcgaagtgacatgattgtgcacaacagccagtcgtgagttcgaatctctgctctactactcaggtcgagcaaggcacttatgtctgcgattgtttgtctgtaaaatgagaaaaatagtaccaagttcaccaggactgctgtgagagtcaagtgagacatgcatataaagaacttagcatagtgctagccagtacaccgcaagcatctaataaatgtcgattcccgtccttgccttgcataggaagaaagaatgcctgcaaatggaaaggggacaaaaaaggaagctaaaaagtcatcagagctaaagaaatgcttagaccaggggggtggacaaacttcttctgtaaagggtcagatggtaggtatcttagactttgtgggtgctacagtctctgtagcaactacacaactccactgctgcagctccagacacctgtagacactatgtgatgaacgcgagtggctgtgttccattaaaacttttcagctcggtacctcccaccacttatttatctgtccaacccatccactcacccacctactcatttatccatcccattcgcttacccatccatctatcccacctaacaatacatccaaccattccctcacctatgcatctgtctgttcagctgttcatccattcattgatctttccatccattcatccactcattcacacacctacctacctacccacccgctcatttattcacccacctaccctctcatccatccagcaaacatgtacacaatacccactatgtgccaggctaagtctggtagagattagacactagtgaggatagacggagagtaaataattatgctaataagtaagctatgtccaataacaataagtgctataaagaaaataagaatgatcaggcgcagtggctcatgcctgtaatcccaacactttcagaggctgaggcaggaggattgcttgaggccaggagttcgaggctgcagtgagctatgatcatgtcactgcaatccagcctgggtgacagagtgagaccctgcctcttaaaagaaagaatgatgaaatagagaccactgagaaaccataccatggttggtatggacaggatgctctgagaagtgacatttgagcttccccaaagaatgtgtgaaggaatcaatcatacaaagggcaggagaaagagcgctccaggcagagagagcagcaggtgcaatggctccgaggtgggaagtagcttagggtgccagagaaaggggtcccatgaggctggcaggcagtgagtgggggcgagataagaagcttggaatttctttctttctttctttctttctttttttttttttcttattcttttttttgagacagagtttcgctcttgtcgcccagagaagagtgtatatggcgcaatctcagctcactgcaacctccacctcctggcttcaaacgattctcttgccttagcctctcgagtagctgggactacaggtgcctgccaccacacgtggctaatttttgtatttttagtagagacggaatttcactacgttggtccaggctggtctcaaactcctgagctcaggtgacacacccgccttggcctcccaaagtgcttacaggtatgagccacccctcctggctgggatttcttctaagagcaagagatagccatggacaggccaacgaacaagcatattgattagcattaatgttttcaacagtcccgcctggctgcagctgtgcagagaacttcagatttgtaggagcaggaccttaagccagtggctgaacctgccctgtcagggtcatccagaggaacctctgtctgggcttctgaagtggtacggtccttctcagggactgacttgatggacctgtcatttagaggaaatgaagacaaagtcagtatctctcccaatggtggggtgtatgtgcctaaccctcaggcccactgacagccactgagctctgggtacactctgtactctttcattcattcatttatctaacagaatactgaccagatatcacacttcccttcttcccatatggtacccagctaaatgccatctattaccccagggtcaagcaagcccattcttctgatgccaattcacaggatgaacttaacttgcccaccattggaactctgttctcagaattttcttttttttttttttttgagatggggtcttgctgcattgcccaggttggtctcaaactcctgagctcaagcaatccacctgcctcagcctcccaaagtgctgggattacaggcatgagccaccatgcccagcctgttctcagaatttttattttggcttaagctttcgtgcaattgttttgttcctactgtataccatcagatttgtcagtccaactggcagaatataaattatgcacaattcagatgctaaagactctttgaatgttttatctgtggatgagtgggctgacttaacctctgtgcctcagtttcctcagctgtaaaaataggaatattatctatctatccatccatccatttatccattcatctacatacctgtatatctacatatacatgtctacctaccttctattaaattgaggttagcccaaagctgcctccttacatattttaagtttggcctaaaggttttccccgtacatagtgaactgtaacctaattggactcaaacagactgcaacctactcctgtgtcaatcactgagtttcagccaatcaaaggcaaccaaccgttcaaaccatgttccaataaagcaaacgctgagctgtaaccaatccggctgtttctgtacctcacttctgttttctgtccttcaccttcctttttctgtctattaatctttgaccccgtggctgtaccagagcctctctggacgtattctggttcagggactgcccgatgtgcggatcattctttgcttagttaacctctgttagccaggtgcagtggctcacgcgtgtaatcccagcactttgggaggctgaggcaggtggaacacctgaagtcaggagtttgagaccatcctggacaacatggcaaaaccctgtctctactaaaaatacaaaaattagccgggcctggtcacatgttgcctgtagtcccagctactcaagagactgaggcatgagaatcgcttgaacctgggagaacggggattgcagtgagccgagattgtgccattgcactccagacctgggcgacagagcaagattctgtctcaaaaccccccccccccccgcaaaaaacaaaaaacctcagacacattaaatttgctagaggttaatttggcacaatctcggctcactgcaacctccgcctccgaggttcaagtgattctcgtgcctcagcctcccgagtagctgggactacaggcacatgccaccacgccggcttttttttttaaattatacttatttgtttatttttagtagagacgggttcaccatgttggccaggctggtctcgaacttgatgtgtacatagatattctctggctatatagggaggactggctgtggtggggaacactgactgtggtggggagcactggctgtagcggggaggactcagtaggacaaggagaggctggaggcagtgaagacttaggaagcagttgcatagtcctggcaagggaataatttggggctaggatcaggtcaattaaatgtttaacattggaactatgtctcttgtatacataactgcatatgtcaagtcttggtatcgttttctttctagcaggggcacattcctttggaatgagcttttactggcaactgctcagaagctgttctgtatataatgaccaccaacagtttaatccttttttcagccatcacctcaggaattaacagtagtatgaaatcaattaaaataatcagtctttgagatgtcatgccttctccacgatcaacttcttctttacaaggctgtgttccaaatacgccaggccaaaaagacgtgaactttgtcctttttagggtttgtgtcttgatgtttcctggctaaatctctttgtatgtgttggccttgtaaggtttactttttttttttcttttttttcgagatggagactgtgttgcccaagctggagtgcagtggtgcagtctcagctcactgcaacctttgcctcccgggttcaggtgattctcctgcctgagcctccctactagctgggattacagacgtgcactaccctgcccggctaatttttatgtttttagtaaaatataaaaattatgtttttatggggggttcttgccatgttggccgggcttgtctcagactcctgactgcctgcctaggcctcccaaagtgctgggattacaggcatgagccaccgcgcccaacctaataactagatctctttaattattggaacatgtatattttgatcagattgacacttttttttttaagtgaagtgatcttatttccctcatttctcatttttaacttttttttttttttgatatggctttaaagctctgtggagctgtaagggtctgggttccttgacactccatgggggtctcaggtgatcgtgggagggctgttggaatcagagctatttggagggtgcataggccagtaggatgggaaggctgtgggagaagtgggctttttggggaccgcagccaaatggacaactgggcctaatctaaagattggcccctcccagctcctactgatggtcatgtaacaggaatggggcccagcaccaccagattttctgatttttttttttttttttgagacacagtcttgctctgttgccaggctggagtgcagtggcatgatattggctcactgcaacctccgcctcctgggttcaagtgattcccctgcctcagcctcccaagtagctgagactacaggcatgcgccaccatgcctggctagttttttgtactttagtagagatgaggttttaccatgttggccaggatggtcttgatctcctgacctcgtgatcctcctgcctcggcctcccaaagtgctgggatgacaggcgtgagccactgcgcccagaagattttctgatttttaaagttatgccagagaccgggcgtggtggctcacgcctgtcattccaacactttgggagactgaggttggcagatcacctgaggtttaggacttcgagactagactggccaatatggtaaaaccttgtctttactaaaaattcaaaaaaaattagccagcggggtgaccgcagtccggtacctcaactgtccctgtcttcatctctctttttccctccgatcccaggaggagcaaatgaggcagaaggactcacgggcacggctcaccagctctatcctcaggaactcgaagaccatcaagttccatggctgggagggagcctttctggacagagtcctgggcatccgaggccaggagctgggcgccttgcggacctccggcctcctcttctctgtgtcgctggtgtccttccaagtgtctacatttctggtgacgtcactctagtctctatgctgagcagcactggggaaggagtgcgggggtgggggcagggtgaggtaggtggagccccccagatcctaccaccccgtccatcaaaacccactcattctggatcctgttctctctgggtccctgctgtcttctacaagaactaattaatcatattattctagcaaaggtggcagtggctgataaagtctgctgaactctcagagagagttccaggcttctaccgatgtggggaggagggtacagatgcaggggggtggcagaggtagaatcctgggtcagagtgacttccctgatcctggccagcagatgtccatagccaccctgtcactggacgtgatccttgtcctgccattctgtaattatttcatatggcttgtcagaacaaccttcctaaaccacagttttaaaaaatttgatacgtaggctgggtgtggtggctcatgcctgtcgtcccaatactttgggaggccgaggtgggtggatcacctgaggtcaggagttcaagaccagcctggccaacatggcgaaaccctgtctctactaaaaatacaaaaattagctggttgcagtggcgggcgcctgtaatcccagctacttgggagtctgaggcaggagaatcacttgaacccaggaggcagaggttgcagtgagccgagatcatgccactgtactccagcctgggcgacagagcaagacttcatctcaaaaaaaaaaaaaaaagcaccacaaatggcaccaacacctagagccctcaagtgctgctcctgcctgcaactttagagtcatcttccaagggactctagaatcacaagttccaccacgtctagaacaacagggctaccaagatcaaaaactctgctgtcccccgatgcctggaacctagaggcattaggttctcccctaggttctagtgatgcctagagccgtggggctgcgcactcatcaccattagcaatgcgctgtgtctttagagagagccttatgtagcttatgactgcggagaggacatgtgttagcaggactgggagtgggatctacggagggaagcacatgcggacatggcgggtgggccacatggaccgtgcaggcaccacagcttgcccaggctgccctatccatgcttgcgtgtctcactgttgccccacgtgtcccccccaccccccaggtcgcactggtggtgtttgctgtccacactctggtggccgagaatgctatgaatgcagagaaagcctttgtgactctcacagttctcaacatcctcaacaaggcccaggctttcctgcccttctccatccactccctcgtccaggtgaggtgggtgcaagggctggagccatcctgggagagtgcgtgggctacacctggctccagcttccctacccctgccatttgcagaggagagggaagacagagtgggagggagagggatggtgtggagctggaaaagaggcgggtaggggcaagaacagaggcgggcagagagtacagcaaatacatctggaaggggtcagcctttggagggcaatgtgcagacctttccacacacacctcagaacatgcatacttgtccatctgcccagcaattccacatacaagcaatcatgtcagttcccttttttatacaaagcgattttgtttctcttcctttgctatctctagtcctttcagcatggtgaaaacaagaaacggcggcatacctgagccatctccatgttttttattttttatttttatttatttatttatttgagatggagtctcactctgtcacccaggctggagtgcagtggtgcaatctcggctcactgcaagatctacctcgcagattcaagtgattctcctgccccagcctgccaagtagctgggaccacaggcatgcacaaccatgcccagctaatttttttttttttttttgtatttttagtagagatgagatttcaccatgttggccaggcaggtcttgaaccgctgacctcaggtgatctgcccaccttggcctcccaaagtgctgattacagacatgagccactgcacccagtcttatttatttatttattgtgtttttagtagagacagggtttcaccatgttggccaggccaggctggtcttgaacccccgacctcatgtaataagcccgcctcagcctcccaaagtgctaggattacaggcatgagccaccgcgcctagccgccttatttatttatttatttatttatttatttatttaatttatttattgagacagtgtctcactctgtcacccaggctggagtgcagtggcacgatctcagctcactgcatgctcaaactcctggactcaagtgatgcttctacctcccagcctcctgagtagctgggactacaggcatgggccaccacatccggctaatttttttaattttttgtagaaacaaagagtcttgctatgttccccaggtctccaactcctggcctcaagtgatcctcctgcacttggcttcccaaagtgctgggattaccggcatgagccgctgcaacctggctaatctctatttttacgacctggtctccttcttccccaagatgggttgtgactggggagaaaagcccccggttgcaactgttcaaaaaaaaaaaaaaaaaaaaaaaaaaaaaaaaaaaaaaaagtttaaatcgtacaaaagtacataaattaaaaggggatacccccttcctactctctcaaccactgcaaatatatagaagcaaatccttctacaactttctacgtatgtatatacagacctgattaatggtatagtttggtttgttttatatatgtgggtttttttttttgtttgtggagatggagtctcactttgttgcccaggctagagtgcagtcgtacgatcttggctcactgcaacctctgcctcccgggttcaagtagttctcctgcctcagcctcccgagcagctgggattacaggtgcccaccaccacacccagctaatctttgtatttttagtagagatgaggctttaccacattggccaggctggtcttgaactcctgacctcagatgatccacccgcctcggcctcccaaattgctgggattacaggcatgagccaccatgcctggccattatatatgttttgtgtgtgtgatattattaccatatctgtttttacctaaatgggcccacgtggcagcatgatttttgtcctttagcgccctgctttggggacctctctgtgctgtgccgtatagcttcaattcattcttccaacccggtgccttttggtctataatggagatggtgcagtttatttctttgctcttctgttgatggatatttatggtgtgctgtggaatttcaaatgggagcactaggctgcactgacgataccacagggagatgagtttcaggacatgggcctgttggaaggagaggcctcacgtggtagggttgggtgggatgggtgaggcaggggctttaggattgagtcacccttcagtctcttgatgtgtaggatgccctgagtggcccgactcaacccatttcagtccctggcctccagatcatgtagcttatattcttcccatctgtgacccggggatgactgtagcactaaatgataagagttcttgtgattgttaagtgtctgaatacatgtaaaatgcttagaaaagttgctgggatacacaaaatcctgggtggtagtaaaagtatttaacaactgcactgcacaagtatccactatttggaaccagtgctagccagtacagaaacatttcactattttaacaaccatgggccaggcacaggggctcatgtctgtaatcccagctctttgggagcctgaggcaggaggttggcttgtggccaggagtgcaagaccagcctgagcaacatagcaaggtgccatctctacaagaaatacaaaaatgaactgggtgtggtggcatatgcctgtggtcccagatactaaggaggctgaggtgggaggatcgcttgagcccaggaattcaaggctgcagtgagctatgatcatgccactgcactccagcctggatgccagagtgagatgatgtttccaaaaaaaaagaaaactgggctgacaagaaataagaaaacaggctgggtgcggtggctcacacctgtaatcccagcactctggtaggccgaggttggatcacttgaagtcaggagttcgaaaccagcctggccaacatggtgaagccccgtctctactaaaaatagaaaaattagccaggcgtggtggcaggcgtttatagtcccagctactcaggaggctgaggtaggagaatctctttaacccgggaggcagaggttgcagtgagccaagatcgtgctactgcactccagcctgggcaagagagcgagactccgtcacaaaaaaaaaaagaaaaaatacgaaaacagagaagaaaaacaccaccaccatgtctcctgtgtttgggtcagcagagtagggactgaatcccttcttttctgtacacctgaagggtttttcttgcctctgttcctggattctaaattgagtatgtttctccaatgtctaacctaacgtgatttgaaggggttttttttttcttgatagcggggtcctttggtgtggtcttggggctcaagagtagggctagtagggattacagggtcagctctcccaccctcaggaggcccatttttaatagacggtgaagttgaggcccagtgcggtggctcacacctgtaatcccagcacaggagtttgagaccagcctgggcagcatggtgaaaccccatctctattgaaaagaaaaaaaaaaatcaatataaaaaacatttacatgtcaaagtatataataaagtttatgagaaaaatagctggtgatgttgagtgatgggctgatcccagggtcgccccagatgtgttgactgcccgtctcttccaaggtggcccacatgaagagcaaagacaatcggatcaagctgatgaacgaaattctcaatgggatcaaagtgctaaagctttatgcctgggagctggcattcaaggacaaggtgctggccatcaggcaggaggagctgaaggtgctgaagaagtctgcctacctgtcagccgtgggcaccttcacctgggtctgcacgccctttctggtgagtgaagccacatttttcctggccctcattgtttgatgttttattttctctgcgtacctgaatatttttaaaaggtcactatgttgcccaggtgcagtggctcatgcttggtaatcccagcactctgggaggccaaagcaggtggatcacctgaggtcaggagttcaagaccagcctggccaacatggtgaaacccagtctctactaaaaatacaaaaaaataagccgggtgtggtggcgcatgcctgtagtcccagctactagggaggctgaggcaagagaattacttcaacctgggaggcgacggttggagtgggccaagatcacgccagtgcactccagcctgggcgacagagcaagaccttgtctcaaaaacaaacaaaaaagtcactatgtcagcaaggccttccctgaacacttggtttaaacatttgccatcttctccattctcctttgttttattcacacttagcagcttctagccaacctgtgtaggaaccgttcgttatctatttactgtgatataaggagcttgtgccagaatgtaaaccagtgccccctgcttcctgcattaagatagccttgcaagacaaaaagtgcgagctgagtcgaacggcacgcttggtgccatagttgatctacattgtggtgctgcgtccttattttgtcaccaactggtcacaaagtgtggattgtcagtgtctcataggccacatgtcaagtggcatggtactaaacacactactaaaatttacttatttgggctgggatcgggggattgtgccttgaatccacccttggacccatttgaaatgtgccaaagggcctcttaaaggcctaaaccaaaggaaggccaacaagaagtgtccgcaaattgcgttccgagagatgacagtatcaccgtagaaaactaaatttaagagaaaagtaagttagaaagagtaaaaattgaaattaaaatttaataagccaggcatgctggtgtgcacctgtaatccagctactctgggaggatgaggtgggaggactgcttgagcccggaatttccaggctgcaatgagctgtaatcatgccactgccatccagcctgagcaacagagcaagaccctgtctctaaaatacatacatacatacatacatacatacatacatacatacatacaaacaaacaaacaaacaacagaactcacgtcacaccactgccctgcagaaaacctgcgcctgtgttctcactgcacctggaatcccaccttaactctcagaggagacccctgcaaatccttctcctgcttcatctcctccctttctccccctcactcactttcctcaagccacacaagccccctgatgcaccacgagtgtcctcagagcctttgcactggctgctccctctacctggaaagcccttccttccccagatacacacaaggctcactccctccaatgcaagtctctgctcaaatgtgaccttctcaaaacaatcatacatggtcagctgggcatgttgaacaaaaacacttcaaaaagcagtaacactcaggatgccagaggctcgaaaacagccagagatagacttagggagggacaggcacatgctcaccaagggtcatggccacactgggtagaacctttgaccactgtatctaaaacacctctctcagccggacacagtagctcatgcctgtaatcccagcactttgggaggccaaggcaggaggatcacttgagattagaagtttaagaccagcctggccaacatggtgaaaccccgtctctactaaaaatacaaaaaattagtcaggcgtggtggcatgcacctgtaatcccagcactttgggagaccggggcagaagaattgcttgaacccgagaggcagaggttgcagtgagccgagatcacactactgtattccaccctgggtaacagaatgagactccatctcaaaaaaaaaaaaaaaaaaagaaaacacacacacacacacacacacatacatacacacacacacacacacacacacaaaagcttcctcggttactctcaccctcatttcctcatttttatctcaccccaacaccatcattctccaaagcttcttgtcaatgcatgtttcacaaccaacgtcctgtctcccatatagaatgtcgatggcacccaactagagtgtgtctcttttgttccactctctgaaccctcagggactaaacgtcgctaagcacaaaagcagcagtcagtttcatctgctcagtggattaagagccaggccagtggaggagcttctggattcaaactctgtcctcctcccaaggctgtgatattggcctctcccatggtgtctccagcaacctgctctcctgacaagctccaggggacacaaaggtgggcatccgtcttccatgagaggaagccgagccaggtgatcagcagaggcgtggatgatgaggaatgctgaagcccacactacaaatgtggcctgcttagcgggggggatgctgcaggtgaggctgaaggaatccagatgagatgggtgatgttaggggtcaagttgactgggttaagggatacccagattgctgttaaagtgttatttctgggtgtgtctgtgaggatgtttccagacgagactggcatttgaatgagtggactgactaaggaagatccatcctcgccccatgtgggtggcaccgcccaatcagcagagggtccggacacaacaaaaagtcagagtaatggcaaatgcaggcactctctcttctgcagccaggatgtcatcctctcccacccttgaacatcagaactccaggatttctggcctctgggacttacccaatgactccaggttctcaggcctttgactatggactgagaattccaccatcagcttcctgggtctgagacttttggactaggcctgagccatgctaccagcttcctgggttctccaggttgcagatgacctagggtgggacttctcagcctccataatcacatgatccagtttccctagtagatcccctctcatcctccatccatccatccatccatcatctatcaatcatccatctatctatcatctatccatctacctaccatgtatacatccaccaactatccgtctatcatctacctatcatctatcaatctatcatccatctatctatcatctatccatccatccatccatcctactagttctgtctccatgaagaactgtaataaacagggaccccacctttgcctgccaaaaaccttcaactgggtcatggacatgggccatttccttacaatgctcagtcacagaggcccaagctctatctgcctcccacgagacaatttctcccatcacctggaccacccaaacagcctccgaccggagtcacgaggtcctctgctgatgtcctagtggctggcacatggatgtccagattcccacccaccatctgggtctgactgaaggcctgtatcctgggcatccccggaatagaatgaggaacagaaccccggtctggggtttttccctgtaaggccaatgggtctgtggggaatccaatgcaccacactggccccaccacagtttatcgtagtaaacttaccccagaacaggcaacaggaacaaaaacagccattctactacccccatggccgcaatccactgcccccatgtcacccacaatttcatgttccagttcgtccgggctcgagacaagtcttatgtccttgtttaattggcagctgcttttctttcttactgttacatagaataataacgcatcacgcaactaatggtgtctcagatttgatgagttaaggtatgtgcaggggaggcactggcctgattcccgaagagtgacagaggtggtgcagtggggcacgccttacatagggggtagagcctaaaatccagtacagccaaaatcaccctcaaatggggcttctttggctaaacagacttacgtggtcagctgggcatgttggacagaacattcaaacagcaagaacatgcaggatgccagatgctcagaaagagacagaaaaaagtgagactgactcaaggagggatagtcacgcgccatggcagacagcatcaactgcctgtttggacaacatttttcttctttttttttttttgagacggagtctcactctgtctcccaggctagtatgcagtggcacaatctcagctcactgcaacctccgcctcctgggttcaagtgattctcctgtcagcctcctgagtagctatgattacaggcgcctgccaccatgcctagctaatttttgtatttttagtagagacagggtttcaccatgttggccaggctggtctcaaactcccgaccaagtgatccgcctgccttggcctcccaaagtgctgggattagacacgagagccaccgcacccagcttctttcttcttttctctgcccagttgctttaatgacatgtgagatcctaccccatttggcagaaaagcaaactgaggccaggaggagaagtgaggcatcttgcccagaaccacaaagctagtaacaggcagcactgccagggccccatcctggattgaggccacaggagtggaaaggaggtgaccagggcatcctggaggacaaggaaactcacacttacttcctagtcttggcgcattccttcttccagttctttaccaaaacaggcacgacttgttccgacgtgtcctccttgtttaaggaccagaggtcactgccctccaggggctggcggtagccccggacaatcaacctggggccaagacacaagggggttaggcaatgagagtcaatgacaggaggagggggaggacggggctcactcactccacacgcctgctgatgctgctcccctctgcagcacagctgcccgctgcaaatgaaggcagccatgcagcttgggaagtcagaatgcagatggacatttgcatatattacaagctaattacagctcattctgttgggtcatgcaggaaaaatggctttttttttttttagtggtgcatacaaaagacttagggaaaaaaagatgatttaggagcgaagtatcaggatagctcttttttattttttattattcgttcattcatttatttacttggagagagggtctcgctgtgtcacccaggatggagtacagtggtgcgatcgcagctccctgcagcctccagctcccggtctagagtggttctcccatctcaacctcccgagtagctgggactttgggtgtaacgccattatgactggctaattttttttttattttttatttttgtagagacaagagtctccctatgttgcccaagctggtcttgaacccccgggctcaagcaaccctcccaccttggcctcccgaagtcttggaattataggcataagccaccgtgccccgccaactttttaaaattttaaattaaaaaaggctgatatgggccaggcacggtagctcatgtctatatcctagcgctctgggaggccgaggtgggaggattttgtgagccctggagttcaagaccagcctggacaacatagggagactatctctacgaaaagtaaaaataaaaaaattagccagtcatgatggctcgcacctgtagtcccagctactcgggaggctgaggtggcaggattgctcaaggccaggaggtggaggctgcaaagagccgtcattgtgtcactgcactccagcctgggcaacagagtcagaccctataaaaagaaaaaaaaaaaaataggctgaaggaaaaaattaaaaaataaaaaggctgacatgacaaagcattagtaagcatgaaatctgggtgatgagattattgagttttattatattaatctttctatgtcactccatccaggctggagtgtaatggcgccatctcagtgcactgcaacctctgcctcctgtattctagcaattctcctgcctcaccctcccaagtagctgggattacaggcgtgtgctgcccggctaatttttgtattgttagtggagacagggtttcaccatgtaggccaggctggtctcgaactcctgacctcaggtgatccacccaccttggcctctgaaagtgctaacattacaggcatgagccaccgtgcccagcagactaaacacttttataataaaaggtaaaatcgaccttatcaaagtcactgcggatccacatggacatcgattgcaccattgcactttgtgacactttataacatatgtcaagcacacaccacaccaaatgacatcacatcacacactaacacacacatacatgaacataaacacactcacaagcacacattcacatataagcacatacacgcatatacatgcctatgactaccgagacacacaagcaggcacatgcacacgtacacacagatgcacaggaatacatacacagatgtgtgcacttgctcatttctccaacccagctcctctttgggcaaggaaataccaacacgggactcctcagaacatacactgggacatgcatttcttttttctttttttgagacagagtctcattctgtcacccaggttggagcgcagtggtgtgatctctgctcactgcaacctccgcctcccagggtcaagagattctcctgcctcagcctcccgactagctgggattacaagcatgcaccaccatgcctggctaatttttgtatttttagcagagatggcatttcaccatgttggctgggctggtctcgaactcctgaactcaactgatctgcctgcctcagcttcccaaagtgctgcgattacaggtgtgagccaccacacctggcctgagacataggtttctaaaatctcttagttatcatcaacctcctcctccatactgatgcccaccaagccctttcgtcacccacaaggtgagcctctgcccctcacagaggtttaggccaaacccaacagaaccacagaggtgaaaagttctcccactgcaatccgcccattaccagctgactagccatgaatcagcatcaaataggtgctccaaggcctccctggcccatactcacaataaaaccaaacagctcatctggctcacaaggggcgtgtcccacctctcaggcacccacgtggctcttagccttctcctgctgtgcctggcgtttttcattgcctgttctctccagacctccccaacccagggccttgtacttattcccctctgctggaacactcttcctctaggtgttggtccacccactaactcacccctctaggtctcccgctcaacatgcagttttctgggcaggccttcccagatctctcttatcaaaagctgcacatgagcctgggcaacacagcaagatcccatctctatttaaaaaaataaagaataggcgaggcgtggtgactcacacctgtaatcccagcactttgagaggccaaggcaagaggatcgcttgagcccagnggtttgagaccatctccccatctttaattattaattaattaaaagtaagccaagttggggagcaggtgtagggagaacatcaggaggaatagctaatggatcctgggcttgattcctagatgatgggttgatctgtgcagcaaatcaccatggcacacatctacctatgtaacgaacttgcacatcctgtacctataccctggaacttaaaataaaagttgaagaaagaaaaaaaattagccaggcatggtggtgtgtgcctgtaattccagctactcagaaagctgaggtaggaagattgcttgagcccaggaggtcaagactacagtgagccgagatcacaccactgcactccagcctaggcaaccagagcacaaacccctgtctcatatataaagaagaaaagaattaagggaaagttaataaagtgttcccttttgttctactagcagaaacggtgtccatctctacactcctcactgataagtttccatatttacagaatttctctgaaactgacaaaatagaccaaggatctcacactcaaatccctcagggggccaggcatttgccacaagtgaggaaagcatgccagtataatacaacagggagtgccggggactccagcaactcctcagctctgccctgtaggattataggcctaatctgtcagaactttacttttccagaacatctggacagctagaattcataaaaaatacctgatttgtaattatctgctcacattttccaaaatcaccatgccaagtgagaaacctacaggcctgcaagacagcagttcatcaatgacaaagcagattctctccttcagctcccccagccacatctaagcctcagtttttccatctgtaaagtaggtgggatgatattccctgtatcaggggttgagggaggctggaacgagatcctggatggatctaagaaatgttagctggtactgtgtcacgcatctctctcacacacacacgcacacacactcatctgtggtcacacttacagggtcgtggatggtttccgagaacaggggtgagcgatctgagaaacaggacaagacgagctgaatgagtaagagggaaaagtagacgtagaaagtgatgtcacgaaacaggtccacctgggcatcctacatggtggggaaggaaggaagaaaaagatcacattctggggctgggtgtggtggctcacgcctgtaatcctagcacttttggaggccgagacaggcagaacacctgaggtcaagagttggagaccatcctggtcaacatggtgaaaccccgtctctactaaaaatacaaaaattggccagacgtggtggtgggcaactgtaatcccagctactcgggaggctgagacaggagaatcacttgaacccaggaggcggaggctgcagtgagccgagatcacgccactgcattccagcctgtgtgacagagcaaaactccatctcaaaaaaaaaaaaaaaaaaaaaaccaagatcacattctgagagcaggtggcagaaacccactcagccacagggacactgcaggctccccaggggctcccagctccccccgggatgtaatggcagaaagccggctccatcacgggtagtctcactgctcaccgctgcctgatgggaggaagacagggcttgggagtgaaacagagctgtatcaaggcctggctctctcacactggctgtgggatcttgtcaacttatttaacctttctgtgcctcagattccccacctataaaccaccggtggttcttaaccaggggtgattctgcctcccaggaaacatctggcagtgtctggggatatcttctttgtggtaacttgggagtgttatggcacccagtcaggggaagccagggacacccctaaatgtctacaaagcacaggacagcccctacaaccaacgagtctccaatccaaaatgtcgattagtgctgaggctgagaaattctgtccaagtcactgcaagaggtcaggaagattattcgtgacacatacacagtcccctgcgaggcactttgaaaacatgaactcaatcagcatcagctgctatcactcataataatatgtaggcaatcaatagtcaaatgttcagcttcttttccttcctttgcctcatgccagtctctaattagctccaagatggcaggaacagcaggttattccaaaagcacacactccaggtcaggcgtggtggctcacgcctgtaatcccaacactttgggaggccgaggcgggtggatcacgaagtcaagtgatcgacaccatcctggccaacgtggtgaaaccccgtctctactaaaaatacaaaaattagctgggcatggtggcgcgtgcctgtggtcccagctactggggaggctgaggcaggagaatcgcttgaacataggaggtagaagttacagtgagcctagatcgtgccactgcactccagcctggtgacagagcgagactccgcctcaacaacagcaaaaaaaaaaaaaaaaaagtgcacactcctcaaaattcctagcagcagcacacagcagccaatgtaaacaacttccccagccagagcagcaactgatgggacaaaggtaacgcgaggacaagcctagggtcccccaggggaacagtcactctgcaaacaccgttcccggctcggctccatcccagcctggcaaaatttggagccgcctgtcttgctgtttcctgctgatggggccagcctggcatcggcccacagctcctgcccttggaggtcccatgggagccccttggagcaacacagacaaatcaggcccctggggaaaggaggtgctagaaaaaaggctggggctgatttagtgaggatttggtggggtaggaaagtcaccaagggagaagctaggtgcatgtggtacccagcccctggttcccatggcaacgcatgacttctacacaagccagagggacccagcatctctccctccgggtccactgaaggaagatgaggaaggagactgccacttacctcttttaaggctgtcataattttggatctcaggatggctagggcacacactagggctaccagccagaaagtgagcatgatccctgaagactgaactcccttcctcctctccagctgaattaaaaaggtagcaagcagctgaggagagaagcacaagacaggagttgttgggtttttttttgagacagagtttcactcttgtcacccaggctggagcgcagtggtgcaatctcagctcacttgcaacctccgcctcccaggttcaagtgattctcctgcctcagcttcccaagtagctgggactacaggtgcccgccaccatgcctagctaatttttgtatttttagtaaagacggggtttcaccacgttggccaggctggtctcaaactcctgacctcaggtgatccacttgccttggcctcccaaggtgctgggattacaggtgtgagccactgctcccagccacactatttcttaatggaccacgtaataaatattttggacttcatgggccatagactacatcaaaactactcagctttgccactgcagtgtgaaagtggccatagacaagatgttaatgaatggacatgccttcatgccaataaaactttatttaaaagaacaggcagagaacccagtacagaaaacaaaacccacttgccctgatgctcaacgttcccggggtcagcctctgccccatcgcccctgctctctgcctcggccatctctgctccagccacacacaactctcaagttttccctgtgaccctcaggactttacatgtgcttttctccgcagctggtcctctgccctcagccccttaagctttttaacaacttgctcattctcaggcttcacctccaccatccctccctcagagaagcctggctatgccccagaccaaaccaagctcccctgccttcaccctcacacagcactctgcagacgttcaaacactttgtgccttttgaggaatcatttgtttaatgtctgtttgcacagctagactatatggttgtgtctccaacgcttgatacagagtagggataaaaaaaaaaaaatcagccaggtgcagtggctcatgcctgtaatcccagcactttgggaggccaaggcgggcaggtcaggagtttgagaccagcctggccaacatggtgaaaccctatctctactaaaaatacaaaaattagccaggcgtggtggcatacgcctttagtcacagctagctgggaagctgaggcaggagaatcacttgaacctgggaggcggaggctacactgagctgagatcatgccactgcattccagcctgggcgacagagtgagacgctatctcaaagaaaaaaaaaaaaaacatgtgctggctgcatcctgtcccatattaccagtgcctgcatatcctggttccctgggatatagtcagaatgtttctgacacattcacagctgagctggtggtcctccattccatcccagagatctcaggtagataaagagaggctgaggatctcacaggccagttcacctcttggccagcccagctcagagtcccctgaggagtcaaaagccccaaccctcagactatcacccctgtttcccccagggtgacagaggcataaatgaacgatcaaaagaccaggaacggccaggcacagttgctcacgcctgtaataccagcactttgggaggccaaggcacgtggatcacctgaggccaggagtttgagaccagcctggccaacatggtgaaaccccatctctactaaaaatacaaaaattagccaggtgtggtggcgcgtgcctgtaatcccagttattggggaagctgaggcaggagaatcacttgaacccgggaggcagaggttgcagtgagccaagatcatgccattgcgcctgggaaaaaagagcgaaactctgcctcaaaggaaaaaaaaaaaagaccaggaacaaggaatgttaagggaggatgacctactcaagtcaaaaacagctgaccacgtatggtggctcatgcctgtaatcccaccactttaggaggccaaggcagagggatcacttgggctcgggagtttaagactagcctgggcaacatggaaagaccctgtctctattatagtgaaattgaaaaaaaaaaaaaaaaatccactctaataccccactgccagaacacagagcccaagacccgaattcaggacaaagcaaagccctttactctctcattccctccatgcatttatggaacgcttactgcatgccaggcacagggccaggctctgaggacacaaaggggaatcaaacccagcaggagagccaggcgtaaagcaggtgccaggctacacgctggggcctagactggaagctggctctaccacttactgaccaggtgaccttgggccagtccttctcctctctgtaccacactttgcttaccttatttacaacgtaaaagggttaataaagggattaggacagttcttggcagagagtggacagcacatatgtgtgctatatagaatcatggtctgggcagggcatggtggctcacacctantatcctagcactttaggaggcccagacaggaggatcacttgagacaaggagtttgaggccagcctgggcaacatagggagaccctgtctctacaaaaataacaaactggccgggggtggtggctcatgcctgtaatcccagcactttggggggcctaggtgggtggatcacctgaggtccggagttcgagaccagcctggccaacatggtgaaatcccatctctactaaaaatacaaaatcagccgggcgtggtggcgcatgcctgtaatcccagcctctcgggaggctgaggcaggagaatcgcttgaatccaggaggcagaggttgcggcaactcaagatcacaccattacatttcagcctgggcaacaaagcgaaactccatctcggggggaaaaataaaaaaataaataaataaaaaataaatgtagatgggcatgttggtgcatgcctacactcccagctacttgggaggctgaggcagaaggatcatttgagcccaggagttcaagcctgcagtgagctgtgatctcacgccagtgaagtccagcctgggcaacagagtatgactctgactctaaaatttaaaaaatgaaaaattaatttagaaaaataaagattcatggtccttggcaacctggctccacgttgtctttcctgacccctctgtcacatccactctatccccccaaccttcacaccgtgttccttcaccgaacaccttgtcctccctgcctgcatcctccccttaaccttccacccctccctggacacactgttcaccctgctcagaatgtcctgccttaaacttgttctctccttttttttttctttttcttttttgagatgaggtctcgctctgtcccccagactggagcacagtggtgcgatctcggcttactgcagcctccacttcccgggttcaagcaattctcctgcctcagcctcttgagtagctaggactacaggcgtgtgccaccacgccggctaatttttttatttttagtagagacggggttttgccatgttggctatactggtctcaaattcccgacctcaagtgattctcccgcctcagcctcccaaagtgctgggattacaggcatgagccacgatgcccagcctccctcctctttttacaatactcaagggctacactctccgagaactctctgttcagggctcagaagctgcaggttgcaggggctaaaagcatggcatctggggtcccacccctgactcggctgcacattagtggtgtgatcttgagcaggacacttaacctctcttgcctggtttcctcacctgtaagatgggaacaaagcaggacccatctcacagggttgttgtgaaaattcaatgaatttcaagacacgtgaaacaccaagaatactgccaggtacatacatagtaagtgctcaatacacaccagctgtaattaataaagttgtttccttgtctctgtcactcactaagttgtgtatcccccgggacagagcagtttcctatttagcttagcaacccaccccctatgccagatagtgaaaactcaaggccattagaccccaggcagttagtatataagtgaccaaagtagccaatgcaagagcaaagtgtggcaaacgcaacaaaagggggcatctgccactcaatcagtggcagggaagacaatagggcatggtggggactgtggcaaactggacaacacatgccccatccaaagactgcagctggggctgggaacagtggctcatgcttataatgccagtgctctggaaggatcacttgaggccaggagtctaagaccagcctagacaacacagtgagatcccatttctacagaaaaatttaaaattagccaaaaataagctgggcgtggtgacacacacctgtagtcccaactactcagaagtctgaggtaggaggattgcttgaggccagaagtttgaggctgcagtgaactatgatggtaccatagcactccagcctggatgaaagcgagatctcatgtctttaaaaaaaaactaaaaaaaaaacaaaggcttacattttaattttatatcccagctccagctgatcattgccttaaaaaactatgattctagtcttacgagttattacttttggtctccactgagcccagcagatggcccaggggtcacagccagctcctacttaccatggtgatgcccaagagagttgggctgaccagaaacactggggccaggaatatgccccgacttctttcccagaaagagtagaagaggtctgcccagcagacgatccacagcaaaaatcccaaggcctggaagagaagcacatacatatcctacaacagaccgccctggaacctcccccagggcctgcacgaacagctcagccccagggataggagaaccagccagccttcaaatgatcagccacagtcctaggacatggcacatatccactggaataaggacaagtcctcggtatggtgagctggcatccaggccggcacgtgatggtctgtaatcagcctgctacgccccactacctccaacaggactgtttgtctggtcaccatgctccccggtgcctgaacactcaagagctcagctcacagctcatctctagctgcaactccggcgcactgcacaagaaagccctccacgacaaccattcattcaaccagtatttactgagagccctctacgggtgggatatgtttcaaggtgcatccattctcaaatgattcagaaaaaataaattatagcatgcatacagagagagagaacaaaagctcatgataaaacaaatgtagcaaaagattaaaaaatcagtgaatacaggccagattcatgcctgtaataccagcactttgggaggccgaggcaggaggatcactggaagccaggagtttgacaacagcctgggcaacaaggcgagaccctgtctctacaaaaaattgttttaaattagccaggcatggtggtgtatgcctgcagtcccagctaccagctactcaaaaagctgaggcaggaggatggcttgagccaggagttcaaggttgcagtatgctgtgatcataccattgcactccagcctgggcaaaagagcaacaccttgtgtcaaaaaaaaacaaaaaacaacaacaaaaaaaaaaaaaacaggaaacagtgactatgagtgatggatagagaaaatcaggcagcagttcctggtatcatcgcaactttttttttttttttttttttttgagaaggagtctcgctctgttgcacaggctagagtgcagtggcactatctcagttcactgcaacctctgcctcctgggttcaagggatcctcccacctcagcctcccaagttgctaagattacaggcacatgccaccacacccagctcatttttgtatttttagtagagacaggttcaccatgttggtcaggctggtctcaaactcctgacctgcccgccttggcctcccaaagtgctgggattacaggcgtgagccaccacgcctggcccattattgcaattttcctgtagctttaaattatttcaaaataaaagccaacttaaaaaaaaaattaggggccaggcgtggtggttcacactgagcatcccagtactttgggagaccaaggcaggaggactgcttgaggccaggtgttcaagaccagcccgggcaacacagcaagtcccccctctctacaaaaaataaattaaaaattggccagaaaaaatctatataaatatatttaattaaataaaaaggagatcggctcagtaagaggggaagagctgataatctcccaggaatgccttgagaacaagcctatcattcctattgcataaacagggaaactgaggcttggggaggttaaaaaatttgctcgaggccaaatactaagcggcagagcaaagatttgtacccatgtttgtctccagagctccagttttcacctcccacattattcttctgccttctagaagaaggaacttagggtcaactaagtagaagagaaatgtcagttatcaccaaccaccactccccgtccaggtgcaccttcccaccccccacaacgaaaccccccagtgacttacagttttggttttgttgagaggtgtcatctgaatgtagcctcggtcatgtcgggagagatagaggaagtagaaggggaaacaggcccagaggtaaaaacaaggcacccacacgaggaccgtgttctgaaagcacttggtgaagtcggggttgctggtattccacgtgacattccagtcctgcgaacacaaacacaggcgaggggtcagcaggacacaccccagaggacaggagctcgcctggagcatgaaaccagctgccacggggtttgaagaaacagacaaggctcctatatatccaaggacctttcaggatgaacacgcaaactaaaaagatcagtagccagaaagactaagaaatgaggaacaagggataaaggtatgtggtgtcttctgcactcccacctgagcaacagagaccctgtctcaaaataaataaataaaaataaagctctcttaacaggagcatacaggtcaggtgcagtggctcatgcctgtaatcccagcactttgggaggccaagtgggcagaccactttaggctgggagttcgagaccagcctaggcaagatagtgagatgctgcctctatgaaaaacacaaaaagtggctgagcatggagcgtgcctgtattcccagccactcaggcggctgaagtgggaggagtgcctgagcctggaaggcggaagttgcaacgagctgagatcatgccactgtactacacccttggggcaacagagcgagaccctgtctctcacacacacacacacacacacacacacacaacagtgcatacacacaaaaaaacccaccaacaacaaaaaggtatgtagcatctcatctcacattaacagtccccagaacctgtggcaagtcccactgtagtacgaaagatggagagagccatttaaaggaaccctgaaggatattctcttataaccgaagagccctgtgtcatctagatcactctgaccttgtgaactgaggactttctaatcatcttcattcatcatcatcaccttccccactatgaccatcaccaccaccaatatcactgccaacaccatcaccaccatcaccaccatcatcatcaccatcgccaccatcaccaccaccatcaccgccaccgccaccgccaccgccaccgccaccaccacggataacaaccaaactgcagttctgtatgccaggctttattctaagtacctcatgtgtattatctcctttcattctgtaattatttttatcatctcctttttcagatgtgaaactcaggcacagaagggttaaatactgtgtccagtatcacacagctggtaagctctggagctgaattcaaactcgggcaatgttgttcaagtctgcattttgccactgagctgtccagccttggaaacaattttgtttcaattacttttacttaaaaaaaaaaagcctgtattttgctaaagagccatcgccaaatagacaaattcatagatacatacataaatagatcagatgtacctgcccaagaataaacctccaccatcagctgttctgtaatgaagaatttaaatttttcttttttttttctttttttgaaatgaggtcttgctctgttgcccaggctgaagtgtggtggtaagatcacagcttcctgtgccttgaacttttgggctcaagcagtcctcccacctctgcctcccaagcagctatactacaggtgtgcaccaccatgcccagctgaagaatttaaatttaattcaagccataatctggcaactgactaaataactttgggaaaacttactaccctttttggggtctcaatttcctatctccaccacaattcaatcggataaaataagaagtacaaaataggtttccccacccacagtttggcccatagatggcttgttgttattgcttgggcctaaactccatgaagaagacattgtgagagaaccactcaccttctctcctgcgtggatcttgaaggacacgccctgcacagccagcgggagctcaggtcggtatcttagcccaaagtcccggaactcgatctgcccgccctgaggccaggggggctgagctgcacatgtgggcagcctccagggagcctggagcaggaggggaaactgagtcagaggagccttcctctaagacttcacacaagatggcccacctctatcagcttcagttttctcttccgcaaaatggacgtatttattgctgttttacagggttgttatgggaattcaacaagagagggcatggactatgtcaatgctaaaaacagatggtggtggctacttttagtctattttattgttattattagccactgtttattataaaataatctctttttctatagtgggagcagacatttctctttgtctttgtgaaaggacatgactgtgcagtgggaagaccaatactgcctttgctgttcccgtgaccttgaacagatcattctacccccttgagtcttggttttccaatctgggaaatagggctaataagagcagcagacatgtattgagtgtttgcaatggaccaggcactctattaaatcatttctttgcaggatctcatttgatcctcccagtaaactcaacgctgttatgttactgttacattagtgctatgctgctgttcttatcctttcttccacccaatcccatccatccattcatccatccatctcttatcctttatccaccccatcccacccatccatccatccatgcatccatccatccatctccaatcccatccctccatctctcattcttccatcccattccatccattcatctgtccatctctcaccatttcttctaccctattcatcaactaattaattcttccttgttctgttactgtaatgttactgttatattgctaacacattatatcatgttgctgttttgttaccgttgcgttgctatgttgctgttctgtccttataatgctactgttatgttgctggaattttgccatcatgttactagttaaatgttgtgtccttgttgttttctgtatctgtgtacgagttgtccatgcttgtctatgtctcgttgagctattaatttgtcagtgtatgtttgtctggaactgttgccatcatgttactataatgttgctgttttgttactgttacattgttatgttgctactctgttactctgttacagtcgtgttgctgggatgttgctgtcatgttatgatgttgctgttgtgttactattgcattgctatgttgctgttttgtttctatcatgttactaaaatgttgctattacgttactattacattgctatgttgtggttgtattgctggaatgttgccatcatgttactataatgtctctattatgttactattacactgctatgttgctattctggttactgcaatattgtggttatgttgctgttacattactgttacattgctgttgcattactctcatgttctggaatattgccattgtgttgctgttgccattatgttactatcatgttgcagctatgttgctgttgcaatgctgttccttgtggttccctgcactcccatgggtgacctgctttcctcaagctcagaagcaaaggaaccaagatttggcctggctccaaaccttatgctcctaaccactgctgccaccctgtctgtgactctgacctatagtggtgggggttgagtgaggggagaagagggtataaactccaaagcctgtagcagatgtcaacagggacccattgccccccccacaatatgtccttgctgggaccccctccccacctcccgcccatcacctccttgggcgtccaggcatagtcctgcatccgctccactgacacgatgctgttctctaggtctgtccagttgcgaacaacccactgcagtgtctgggtcacctggtgcaagaaagcctctctggctgggtttggcaaggccacttgagggcttgcaacagcccccctggtttcccaaccttttctgggaggccagacccaggggagtaaagaggggaggcaggaatgggacagtctgaggacctgggcccaggggattgggatttggatacaaccaacaggtccctctcttccttcagtagaaccagagcatgcagagcaaaaagaagccctcagacatcagcttgtacaaactggcttgatgcaggtgagtagacaggatcagagagggtgtgtggccctcccaaggacacacagcaggacccaggcccactgattccattctgacggctttctcgcagcgactgggtggccaccaatttcccatgacacttagaaccactccaagctcctccctatgagccattagcagctctagccctgccatcccatccccaaccttgtctcccagcacccctgccttcacccaccctctccagccacacccatcttcttgctgttcctctaacacaccagggatgaaccttcaactcccaggccttttcttcctgctgttaacctcacttcctcctaagtcacctcctcagagaggcctttctggatgcagtaggaaagttccctcactgccacccaacatgctccagcctcttacttcatccttaagcttagcagccttgactgtaaaatgaggataataacagtgcttctctgatggggttgtgggcagtattaagtgagttaatatttataaaattcttgtgcacagtggctcatgcctataatcccagctttttggaagtctaagcaggaagattgtttgaacccaggaattgaaggctgcagtgagctgtgatcacaccactgcactccagtctgggcaaaagagtgagaccttgtctcaaaacaaaacagctgggcatggtggctcacacctataatctcagcattttgggaggctggggcaggcagaccacttgaacctagagtttgagaccaggttgggcaacatggtgaaactgtttctaccaaaaaaaaaaaaaaaaaaaaaaaaaaaaattagccaggcatggtggtgcatgcttgtagtcccagctaattgggaaagtgaggtgggagaatcccttgagcctggagatggaggctgaagtgagccaagatcatgccactgcactcaagcctaggcaacaaaatgagatcctgtctcaaacagcaacaacaacaaaccaaaacgaacaaaaacatataaagctcttagaataatgcctcctccataacaaatgcttatgagtgtatatatatatttttttcatagatgtcatgaactgacattacatactgttaatagttaacaaaaattagccaggcatagtggctcacgcctgtaattccagcaacttgggaggctgaggcataagaatcgcttgaacccaggaggcagagttctcagtgagccgagattgcaccactgcactccagcctgagtaaaagagagagactctgtcttcaaaacaaaacaaaagttaacaatgcactagaaatgtcctccacaggatatgctttgtctcaactagtctttataacatcagaagtagtgggatttctggcctgtctttccaaggagcacactgacactccacaaggaaagactcttgcacaaggcttgcaagttcaccttagctgagtctggactcttgtaagctgcgtgtccctccttggtggagggaccacacaccatggtggtttggacacagggtcttcaaaggtcccactacaggtccgacagtctctgcctctgtctgtccctcaagcccagtcttgggggatgtggggagtacctggagggcagcagagacagagaagcccacgaggccagcactgaggtgggctttgctcagcacagcacacgtggcagctgcaaacaccaggccattccccaggagctccacattggccgcaagccacctgcaaagggaagcgacagcagggtgagtggttactctcatctgcagggagatgcttctctgggcacaaggactggtcatcacaccagctttgtacacacaggggtcccagcaatggcctccacatgcaacccaggctcagggagtagaggaagatgacaccgtcctgtctcaactaagcccactttagggtctggggtacactcggtgttctgaagagcatccctgtgtggctgcttttctgtccctggaatttgccaagccatgtccacctgccattcccctggcctgaaccatggcctccatggtttggctctgtgtccccacccaaatctcatctcaaattgtaatccccacatgtggagggagggatctggtgggaggtgactggatcatgggggcagttttccccatattgttctcgagatagtgagttctcacaagatcatatggcgtaaaaggatgcggcagttcccacctcatgctctccctctcctgctgccatgtaagacgtgccttgcttccctttccaccatgattgtaagtttcctgaggcctccccagccacgtggaactgagtcaattaaaccttcctttctttataaattactcagtctcaggtagttctttttagcagtgtgaagatggactaatacacagccccagctggctggggacctgagatgaaaggaaaaaggacttcacatgtattgagcacctagtgtgtacttgaccctctccacactctggtaccagactgcttggattcaaatcctggctctgccagtattagctgtgagaccctggacaagtttccaaacctcactgtgcctaggatttatcatctatagaacagtttcttcctggtgaagctgttagcagaattaaataaattaatctacatagattgctcagaacagtgccaggcatgcagtaagcatgttacaggtcttacctatgagtgtctgtatttaatcctcatatccactccatgagcacgatcccagtttgacaaatgaggctcagagaggttatgtaacttgcctgaaatcaaccagctggtaagtggcagagctgggatttgaacctgtgtctatttgtgcttaaagcttgtgttcttgttcttgcttagtacctaaagatggctgaggatgcttatatggctgctttatcaccaaggcaaaagaggttgatccagttgcctggcaacagaagcttcttcctgtaccccccgcccacctgctgttgagaatctctcggtcatgttccatctgcccacggtgagaactgatagactgcctgtgggatctagcctcaactatgtccctgactctctgggtgacctcgctaccatacaatatgacctcaggtctcaccctctaaggatatggatgaattgcaaggtcttctctgccctggctcttcctacctgtcagccaccagtcgcgggaaactgatcctctggctttcatctacgcgagcattgttctgagccacaaagggggcctgggttcggaatgcccggaccactgtgctgccctggaacgtctcagccatgtgggagcagacagacgagtagctggctgactccaagcgtctcagctggcatgagctaaccacatacaggctctgagaaggatggatgggagagggaagaggagaagccacagacatagagaggtagtttccagaagcacagagagccccaagtacaggattccagaccaggatctgttaacagcttactgtgtgaccttgggctagttgcttgccctctctgggttctcatttccttgcagaatcagagttctatggtttttttgaaaatcacctggggagcttcaaaaacctctaatgccccaccccagaatgactgaatcggaatctctggaaatgtcaccttgactttggtgctgtttaaatagccttccagatgattctaagggacagccagggttgagaaaccaccaatttagtttaagtgtctcacttcccagcactgaggccgactacttcatttacggctggtcagtgggagaacaaaactgtaaggggcaatgaaggcagttggccaagtcagtttcactcatgtaacccaagggttacatgccaggtgatgtgcagaaaatattcgttatttggtttgcagctgcaggttgggtgcagctggcagacaggcaggcagggaggaactgaatttgctgaacacccaactgtatgtgccaggcttttcacacagtgtctcattcattgcagagtgagcattcgcgtcattcatcagttagtggtgagaacatccaaggctcgggggattcagcagctgtcctgagtgccacagtaagtgatagagcctggatttaaacccatctttgcttgactctaaagcttgagacagaaacagcccatcctcggagtcaagtgaacttagagaagacctaggacaattgtcggggacagtggtagccatgggttttgttgtttgttttttgagatggagtctctctctgtcacccaggctggagtgcggtggtgcaatctcagctcgctgcaacctctgcctcccgggctcaagcaatcctcccgcctcatcctcccaagaagctgggattacaagcatgcgccaccacactggctaaatttttgtatttttagtagacggagtttcaccatgttgaccaggctggtctcgaactcctgacctcaagtgatctgcccacctcagcctcccaaagtgctgtgattagatgtgtgagccaccatgcctagccctagccatggtttttatctgactaccatgttttctacttctggtttcctgtgggaaagggctgggttggggtgctgtcaatcatgggacctgatcagagaggtggtcacatgatgcagcctagtgtatcagaatctactatccattcagttactgtgacgagttcagagatggacacatgatccacaaagggccaatcagaaccttccctgggattaatatatgactactgagctgaagaaacgttttttgcatgttgagttgctaaggtgagatgatatgatagctagtggccataagacctgccctggaaagagagcgtgtacaaaattagaccagaggtaagccagtggttcctaaacatttgtgtacatcagaattacttggagggttaattaaaacctagattcatgggccgacccacatagtatctgaggcagtagtcctgggctggggcctaagaatgtactttgctaactagtccccaggtgatactactgctggtcctggggtcacactttgagaagcactgagtgaagatatggagagagtcactgtgtcctgatgacaactgggcccatgcccccaaggaaatataagccattaaattctattcttttggttaagctaattttagttggtcgctggtcccagcaattgaaagaatctagcttcatataatagcctttgagaccttgcaatgcctttttggcttccagataattggagaggaagaaattacggcaggataaaaacattacgcgtgaaaggctctggcccttaatatttaactgtgccgtggggcacaggggctcatgccctgtaatcccagaactttgggaggccaaggtgggaggatcacttggggccaggaattcgagaccagcctgggcaacacaggaagacacttgtcctacaaaaataaatttaaaaattagccagtcatggtggcacgtgcctgtagtcccagctacttgagaggctgaggtaggaggatcacctgaacccaggagttcaaggctgcagggagctatgatcacctattgcacttcagccttggcaggagagcaagattctgtctctctaaaaaaaagaactttgatgtgaacatttagagacagacactagtggagataccagaaagactgtagtgtccctgtccctgggaattctaggaacagcccctagatgtccagctgggtgaaacctcatatatggagtcttccccagagacaggggacttggctgagttgacctcagccggtcccggaagcctccctgacctctccgtacctgaaacccagcgtagaggagaaacagtggcaggatggccacagtggccagtggggtagccactgccaccaccaggctgacctccaggagtccaaaggcgtacatcagcagggaccggagtttgtctggaatgtccacgtcaaccgtgtctgtctccttggagaagcggtttagcaggtgaccaatgggtgtccgctcaaagaagctgatgggagatcgcaccacatcccacaggagcctctggaagagcaacctggatgcccgggccccacctaggagcaccgcagccatggaggcaaacagcccaatggctggggagggagaggaggtaagagcatgagggctggagaccctcaggagcggcccacggggccctgcgcaggtctctcccgctaccccatggtggacatcttatggcttggccaccctgattattatatttttttgagacagggtctcactctgtcacccatgttgaagtgcagtagcatgatgatggctcagtgcagccttgacctcctgcactcaagcgatcctcctgcctcaccctccgagtagctgggaccacaggtgtacgccaccatgccggctaatttggggtatttttgtagagatgggatcttgctatgctgtccaggctggtctcgaactcctgggatcaagtgatctgcctgccttggcctcccaaagtgctgagatgacaggcatgagccactgcgcctgtaccctgcttgtttcttgatgtaatgggttgaagagtgtcccccaaaattcatttgggatgggtcctaaattcagtgactgccatttatataagaatactagaggatactcagagacacagcaggagatatgaagatggtgacacagatgggagggtgtatctacaagccaaggaatgccagcgactgccggcgaccaccagaaaccaggagagaagcctggggtgtattctccatcagagcctccacgaggggccgggcacagtggctcatgcctgtaatcacagcactttgggaggccaaggcgggtggatcacctgaggtcaggagttcgagaccagcctgagcaacacggtgaaaccctactaaaccctactctctactaaaaatacaaaaattagctgggcgtggtggcaggcacctgtagtcctagctactcaggaggcttagtcaggagaaacactggaacccaggaggcagaggttgcagtgagccataagccgagatcgtgctactgcactccagcctggttgacagagcaagactccgtctcagaaaaaacaaacaaacaaacaaacaaaaaaaccaaaaaaacctccacaaagagttaacactgctgacaccttgattttagacttcaggcctcagaactgcgacagaacaaatttcaattgtgctgggctcccaagtttgtggcaacttgtttggcagtagccctgtgagagaaatgcacatccttcctcccagtgctaatctgtatgcctggggtggggctaacttctcctctggggtggggcaaatttcatccatggccaatccaaaccactgcagttggttcagggatgaacacataacccaagtcaggccaatgacagggagacgctgggacttcactagaacttttggaaaagtggtacttggttgttggaggtagccaagctggagctgtggaatatcatcttactgccaggggcagcagctaagctggacaggaagctgtcacagaggagggaaataaagcgatttcttgtttggacccctacatccagccatacctgaagccagaaatctagggatactggtcccaagagccaatcaattctcttgttgcttaaacactttgaattggagctgaatttgtttattttcagacggagtcctgctctgtcacccaggctggagtgcagtggtgcaatctctgctcactgcaaactccacctcccaggttcaagcgattctccttcctcagcctcccaagtagctgggattacaaacactgacaccatgcctggctaatttttgtatttttagtagagacggggtttcaccatgttcgccaggctgatcttgaactcctgacctcaagtgatccacccgcctcggcctcccaaagtgctgggattacaggcatgagccactgtatctggcctggagctgaattttttattctttgtattcgagagtcataaccaatttctctctctcagctcccatctctccatctttaggggagagtaagacttgcccttagctatcaaatgagggatggaagtggaaggattttgaaagggctatttgccacccaaatgaggatttgggttaattccagggctcggctgactctgagaatccctaatttcctcttggttaagtaaccattcgccttgagtattccactgtacatgcagttgtggtgagtaggtgtacaggttcttaggactagaagagtcctcaagttcaggcctggcgccccctattttacaggggaggtcacaggctcacagcattttggtgatgtggccaatgtcacccagtgaatgaggacgaatcaacatgaaaacgaggcaactgtcctttaaagatgaagccaggccgggcgtggtggctcatgcctgtgatcccaacactttgggaggttgaggcggaggattgcctgagcccaggagtttgagaccagcctgggcaacacggcgaaaccgtctctatcaaaaacaaaaattagccagcatggtggcatgtgcatgtagtcccagctactcgggaggctgaggtgggaggattgcttgagcccaggaggcagaggttgcagtgagccgagttcgtgccactgcattccagcctgggtgacaaagccagaccctagtctatatatatgtgtgtgtgtgtataattagaagccaaactcacatgtgcatctcctgttactcccttcagccaggccacgtattaaaacggagaagaaccacgggttggcggacagtggtcgcccgtagcaggacaacggtgcggtgtggtttgcacaagggcacacgaaaatggtacagtgatcttcagctcaccctcccaattagctgggactacagccacgcatcaccacatgcagctaacttttccatttttggtagagacaggtttcaccatgtttcccaggctggtcttgaactcctaagctcaggcgatccacccaccttggcctcccaaaatgctgaaattacaggggtgagcccggcttgatttggacttttttataataagaaacatcactctattacttgggtattcaaactttttaaaatacaaaatatctccaaaaataaaaagctgaaagccgggcatgatggctcacacctgtaatcccaacactttgagaggctgaggcaacaggatcacttaagcccaggagtttgagaccagcctgggcaacacagcaaggccccattttagaaattaattattttaatttaaataaagagattaacagcatgtatcctataaggtaagagctaataagggggaaaaaagtagggggtaatttgtactcaactcttgaaagctgagtcacacatacacataataaacaagaccgtgggaaacaaggactttctcagaggctcacagaccttctgattccagtcaccggcctacaaggtctaaccatgtgtcaggagctctcaatcttggctgcccaatataatgacctgggaagctttaaaacatcttgatgtccagaccccacccacaataagtgaatcagaatcccagatatgcagccggggcatcagcatttgttaaggctccccaagtgagtccaactggcaggcaaggctgagaaccccagggacagagcagaaggaactggactaaaatcctcatggagaggcctctgcctagggcccggcttgggggcccgcagagacacatgccttacctgatacgtcttggtcttcatcgccatcacagcattgacgggcaccatgaggaccatcaccgccactccagccaggacggaagggcccagattctaaggaaggaaaggagactcttcatcactcaccagacagaagaaaacagggcccgtaacagcttccccggttgatccatcccacgtggatgctgctgaccaagttcagggcaaggtgtgttacttttaccccacaatagggtgttaagagcctgtggtttcattcctgagcatctctccaggtcctcccaatcccttgaagaataagcaggtccacgctcctttctcccaagcccttggggccacatgagttttgcaaattacaactgcaggattctaatttttttttttttaggagatgaggtctcgctatgttgcccaggctgcagtacagtggctatttgcatcagtgatcctcctacttcagcctccaaagtagctgggactacaggtaagcattaggtcttgctacattgcccaggctggtctccaactcctgggctccagcgatcctcccaattcagcctcccaagtagctgtgactagtcacatcaccatgcccagctaatttttttggttttttgtaaggacaaggtctcactatgttactcaaactgctctcgatctcctgggctcaagtgatcctcccaactcagcctcccaagtagctgtgactacactcacaccaccatgcccagctatttttttgattttttgtagagacaaggtctcactatgttgcctaagctggtctcaaactcatgggctcaagcgactttcccacctctgcctcccaagtagctgggattacaggcgcgagccatcacacccagcttagatttttagaaaggtaataaggtagtaagcagaaaagtgtgaacacgaccacctgattgcttttcctgcttgaaggctgcttacaagtttagcccttggctagtgtctgcatacttacagggtttccaccattaacagaattgggtagagtagctcagtgtgcctcaactgtttgtacaaacaatatggtttatgctgaacaccgctttccctctgggagtctagacttttggtatgtgccaagcaaaggctgcttatgtgacctgcccctaatacaaacccaggaactgagctcctaccaagcttccctggttggcaacatttcacacacataatcatcatggttgccagagaattagtgaacctgtgactctgctggggactcctggaagcctgcacctggcttctcttgaacaccgccccatgtgtgccttaattccttgctaattttgctgtattaacttatagccttgtggccaggtgcagtgactgacacctgtaatcccatcactttgggaggccaaagtggtaagatagctgagggtagaagttcgagaccagcctgggcaacacagcaagacccccatttctacaaaaaaataaataacttagccaggcatggtggcgtgcacctgtagtccccagctagatgagatgacaaagtgggaagactgcttgaggccaagaattcaaggctgcagtgagctatgatcgcaccactgcactccagcctgggcaacagagcaagactctgtcccttaaaaaaacaaaaaaaacaataacaagaacaaaaaaaaaagacagcccccacaacaaagaactgtctggccccaagtgtcaacagtgctgaggctcaagcaactaccatctaaaacaaaacgtgatgttagacaattttcttaacggttcataaaccaatcctgaaggcagttctagaacaaatgttccaaaaatatttttcccatagtagcacttttacaaaagtggactccccaagacacctgcttgaaaagacactttatttagattttttttttcttctagagacagggtcttgccttgtcacccaggtaggagtgcagtggtgtgatcctagcttactgcagcctctgcactcctaggctcaagcaatcctcctgcctcagcctccacggtagctgggaccacaggtaggcaccaccatgcccagctaattttttttttttttttttttttttgtagagacagggtctcactatgttgcccaggctggtctcaaactcctggcttcaagcaatccttccacctcagcctcccaaagtgcagggattacaggcgcatgccacctatatctgtacccagcctattagacaattaaattctggtgttttttctgagttttattattagaaacactttactcaccttctgctctacaaatgtacaaaaaaaaaccaaactacagccaaataaaccagtaattttttcttcttcctttttcttttttttgagacagagtctcgctctgttgcccaagctggtatgcagtggtacaaactcagctcaatacaacctccgcctcccggattcaggccattctcctgcctcagccacccaagtagttgagattataggcatacaccaccatgcctgactaatgtttatatttttagtagagacggggttttgccatgttggccaggctgctctcctggcctcagatgatccacccgccttggcctcccaaagtgttcagatcacaagcatgagccatttcgtccagcccttctctttcaataacagataataatttgagctgtgcccattatgcatcaggccctgctggggttgtacccacagaagacacaaaagtcagctgctatatgtctgcaagtagctaacatgttacccttcaaagaggaggcagtacactgagcatgcaaaaaaaacaaaacaaaactatttcagggagtgggctgggcacggtggctcacgcctgtaattccaacactttgggagaccacagagggtagatcacctgaggccaggagttcaagatcagcctagccaacatgatcaaacactgtctctactaaaaatacaaaaaaaaaagaaaatttaatgggcgtggtggtgtaagcctgtagtcccagctactcgggagactgaggtaggagaattgcttgaagctgggaggcagaggttgcagcgagccaagatggcacaccacactccagcctgggcaacagagcgcgactccatgtcaaaacaaaaacaaaacaaaaaaaactatttcagaaagtattattagatgagttcctatactaaagttattgggactcaaaattcaaaagaagaagtccatctaattgagaagggagggtaaatcaatggaagtagtgtttgttacagccttgggggatgagcaggctttcatcaattaggaagaaggaaggaaaggtacgtggcaaagatccagaggtagcaaagcacaaggcatgtgttgtgctatgagcctctttgcttatcattttattttgggaactctccctctccacatggaagggctgtcaatcacatctcttctgccatgggagaggacatgtgacccaggctggccaatgagagaactctgcctcctgggccacagtgattggttcacgggtgtgaataggaccaagccaggctaatcagagtgctctctgagactgactctggctgtgcagagaaatgctgccttgtcttttctctggcacctttatctatcaggatgttatcagcccaaagctacggagccatgtagggaagtaccactgagaatgatgttaactcagaggacaacagggcagtgggtgaaactgagtactgacaacattgcttgatctcctggatcaatccacacctgaagctagtccccagatttctgagatacatgcagccccaaagttccctctatttacttaggctacttttttttttttttggaattggagtttcactcttgttgcccaggctggagtgcaatggcccaatctcggctcaccgcaacctccgccttccaggttcaagcaattctcctgtctcagcctcccaggtagctggcattacaggcatacaccaccacgcccagctcattttgtatttttagtagagacggggtttctccacgttgaggctggtctcgaactcctgatctcaggtgatctgcccgcctcggcctcccaaagtgctgggattacaggcgtgagcctctgcaaccggccacttaggctactttaagacagatttatatcccttgcaattgagagaattttgaccaccataattagggactaatgaataagtgagtctggttagcgtttgggaggattcaaggggagaaatatgatgtgtcgtccattgtagggtagttaattactgacactgtcaaggaaaagagaaaatgaaaacgccatgccaccaaggagaacatcaacctgacaattcaggaaaggaacaaaatactgaggaattggttaacaggctggaaaataaaatatgaaccacagccggaactgccagggagctctacatgccattaccatcaacacccactccctcggcccactgcccacacgtagaagtccctccctgcatgcaaagggaaacggcgttaaacacacaccagccacaggaggtagagagcaaggatgacttgcaggggggctgaccagatcatgttaatgtacgtggccaagtccatgaacctctgagcgtccacagacatgaggttgacaatctccccgaccgtggaggattttctggctgaattggtgatcaccagggcctgtgggacaaaggagagggaaggtgggtgagtgtggcagctgaagaggcctgactctccctccagacccacggagaggaaggagactctcaggggcagaaatgccgcagatctctcctcctcccctcccgacctatctgtctgcccaggacgcctgtgtcatctcaaagcccacattcttatccgcggtgctcagtgcctcccaaccttgaactcatcagttggcaagggaccctaggtgtcctcgaaaccagggcttcgcatgctttaatgtgcacacatgcggccgggtttttctggggggagtggtggggggtggggggagttgttttggattctgcaagtctggggtgtggcctgggattctgcatttctacgcttccaggctgtgtcagtgctactggtcccagatcccactgaaggactgagggtgtgggccagggtctctaatccttggcattcttgacatctggagccagataattctttggggggctgtcctgcgcactgtaggagttttagcagcaatacctggcctcgacccactacatgccctcgcccccagttgggacaaccgaaaatgcccccagatattgccaaacgtgccctggtgggggaaaatgtccctagccctcaaacatgattgcacactatcacctcgtgagttttaaaaacactaagacattagcaggcgtggtgatgcatgcctctgggcccagctacgtggtgggctgaggtggcaggatcgtttgagcccaggaggtggaggctgcagtgagccaagatcatgccactgcactctagcctgggtgacagagcgagaccctgtctcaaaacataaaaataaataaaaaacaaaaacaatgacacctgggtgccaccacagcaatcgcaatttcactggtctggtgcaacctaggtgtcaggaagtttttttgttttttcagacagggtctcattctgtcacacaggccggaatgcagggatgctatcaggactcactgcagcctccaactccggggctgaagtgattcttttaactcaatctcctgagtagacgggactacaggtacgcaccaccatacctggctaatttttttaaattttctgcagagccagggtcttgctatattgaccaggctggtattgaacttccaagcctccagtgattcccccaccttggtctcccaagctgctgggattacaggcatgagctacagtgcctggcctgcatcagtttaagctccccaggtgagtctaattcacagacaggcctgagaatcactcctctagttcatcaagtacctgcaagactgtctcttcctaacctaggagccaagcagtttccttgacctcgagacaaaaaaaaaaaaaaatttatagggatcaagaaggtaatttaggtcctttgaaattggatgtacacaaatgcctgctacatactcttaccatgcaaggaatgtgccacctgctcagttcaaattaagagtgacaacaggctgggcgcggtggctcatgcctgtaatcccagcactttgggaggctgaggcaggcggatcacctgaggtcagcagttcaagatcagcctggccaacatggcgaaaccctgtctctactaaaaatacaaaaattagccggtcgtggtggcaggcgcctgtagtccccgctactcaggaggctgaggcagaagaatcgcttgaactcaggaggcagaagttgcagtgagccaatatcatgccactgcactccagtctgggggagagagtgagacctggtctcaaaaaaacgaaaaaaaaagagtgacaacaagctgaaacacagaatgttaacagcagaatgaggatccaaacttggatttccccacaacaagggccactgatccatctaagaaactcaattactcacagctgatacacaaagacatctacacgcccacccttgaaatcagctttcctaacgtacaatgcctgatgcgtgctgtccctgccacctaaggtcacggaagctaccctcatcctactgctccagaagctgggctggaaatccccacgctggccccagagtaacccagggctgcaggaggggatgtggaagtcgggccacatgccaatggcacagcgtcccctaccttccgatagacagccccaatgacagcggtcttgatcctcatgccactgacgaagcagatgtggaagtactggtgcagcacgagggtctgcaggcaggcagtgacaaacagcagcacggtgtagaagtagccctgccagtctggggccttcgtgtcattcacgaacttgatgagcaacctgcaaaggagcaaagagagggcctggaatgacttgtgacacgtgggggcagggaagagagcttcagtgttggcactgcaactttctcctgagccagatgagctagacactatcacttcaatttcatagatggaaaaacaagtccacagtggtgatctggctgtgcaggtgacccaaactgctcataaaagaggcctctgccttggggttgtgcactaattgctctagctatatctcatcaccagcaagtcacccaaaggaattgcatagggaacacgaggtaaagaggtagggaggaaaagagaagggatgtgtagcccctgagtcacagagcagcagagagccaggtaggagagaggcaacttcctttctgactccccagttcctggttgcagttttttgttgttgtttttattctttttttttttttttttttttttgagacaaagtcttgctctgtcgccaaggtttgagttcagtgatgcaatcagcttgctgtaacctctgcctcctgggttcaagcaatttttatgcctcagcctcctgagtagctgggattacaggcgtgcaccaccacgcccggctaatttttgtatttttagcagatggttttaccatgctggccaggctggtcttgacctcctgacctcaggtgatcttcccacctcagcctctcaaagtgctgggattataggcatgagccactgcgcccaaccctggttgcagttttttcatgagatctgctggcatttccttgctcttggtttcccaagacaatgccatatcctccccatttgggttttaggggagcctagtgggtttctgttacttgcaaacgatgtggtcttcactaatatggtaattaagtaaagcataaagtaaagctaggcagtgaccatggctcacatctgcaatcccagcactttgggaggccgaggcaggaggatcgcttgaagtcaggagctcgagaccagcctgaccaacaaagcaagaccctgtctctatttttttcaaaaaagctaaagtaaaaatggagacatctggctatgagcccacttcaggacacagcatgaccccagggttatgactgatgcaactgaaagatcaaagccaaggagggaaaatggagcccacctgggagggaaggggtcttactttaagatctgcggcccggaaaacatcatcaggtcgtggatggccttgaagaagaagctcatgaggaagtagggcccaaaggtcttgtataacaccttaaacagagaggggttccactccttctgtggggacttgacgatcaaagcctccacctcctcattcgcatccaccttggaactctctttcggctgggcaggatccttggaggagtacacaaccttcaccggctgcctggaacacaaggaggtgaagccgttgtggggtctgccagagatgcagccccctaccacagggacatggccagggaatgtcacccttcagggaaggcagagtcaaagacaacaagcccagggaaagaggcagctcagcacagtggttacaaacacgggctccagagccacgggctccagagccaccggctcaaggtctggcttggccactggccagctgcgtgacttcagacaaggtccttaagctctctgggcctcagtttcctcctctgtgaaatgaggataaaagtaggacctacctccaaggtaggtaagattaaacgagttgaataagttaaagacttagaaaactgatggctccaaactgatctagagtcaaggcaatccccatcaaaagcccagctggctgccaggtagaaattatgagctaactttaaaattcacatggaaactcaaggatccagaacagtcaaaacaatcatgaaaaataagaatcaagttggaggattcacacttcctgatttcaaaacaatacaaaataacaatcatggccaggagtggtggttcacacctgtaatcccagcactttgggaggccaaggtggctggatcacttggggtcaggagtttgagaccagcctgaccaacatagtgaaaccccatctctactaaaaatacaaaaattagccgggcatgatggcaggtgcctgtaatcccagctacttgggaggctgaggcaggagaattacttgaacctgggaggtggaggttgctgtgagtggagatcaggccattgcactccagcctgggtgacagagcaaaactccatctcaaaaagaaagaacaacaataggctgggcgcagtggctcacgcctgtaatcccagcactatgggaggccgaggtgggcagatcacctgaggtcggcaggttcaagaccagcctgaccaaacatggagaaacctcatctctactaaaaatacaaaatcagcccggcatggtggcacatacctataatcccagctacttgggaggctgaggcaggagaatcgcttaaacccaggaggcggaggttgtggtgagctgagaccacaccattgcactccagcctgggcaaaaagactcagtctcaaaaagaaaaaaacaaaacaaaaaaaagaacaacaatcatcaagacaggtaaagggataggcatatatacatcagtggaaaaaaaaaaaaaaaaaaaaacagtccagccagccagagcaacacagcaagaccctatttctaaaaaaaaattttttttttgactgggtgcagtggttcatgcctgtaatgccagcacttcgggaggtcgaggcgggtggatcacattgaggtcaggagtttgagaacaccctgaccaacatggcaaaaccttgtctctactaaaaatataaaaaattagccaggcatggtggcggttgcctgtaatcccagctacttgggagggtgagaaaggagaatcgcttgaactcaggaggaggagggggttgcaatgagccgaggttgtgccactgcactccagcctcagcgccacagcaagactctgtcttaaaaagcaaataaataaaattgactgtgatgatgactgcacaactctgtgaacacactaaaaatcagtgaattgtatgttctgcatacatgaattgtgcggtgtatgaatatctcaataaagctgtcaccaaaaaagtagtctttatcttatagggatttttttttttttttttgagatggagtcttgctctatcacacaggctggagtgcaatggtgcgatcctgactccctgcaacctccgcctcctgcgttcaagcgattctcctgcctcagcctcccgagtagctgggattacaggtgtgcgctaccacacccagctaatttttatgtttttagtagagacagggtttcaccatgttagccaagctggtcttgaactcctgacctcaagtgatctgcctgccttgggcccccaaagtgctgagattatgggcatgagccactgtgcccggccaatagttcgttcttgtacatcacttagtattcagttgtgcagatgtacataactggtgcatctgtctgttcacttgctaatagatgtctggcttacctccagtttgggttatcacaaagtagctaagaacattcctgtaccagccttttatgaacatatgttctcagctctgttggctggatgcctgggaagggggtgactggtggtatgttcactgtgtctaacttaaaaaaaaaaaaaaaaaaaactgccaaactcttccagagtcacagaagcatttcacattcatgccagcagaaaccacagtccaaaatggccctaagctctgagtggccatacacaaaagagaacataaaaccactacacacaaaccaatgaagcactgggtttttaaatccaaacaattcaagcaattctcatgcttcagcccccctgtagctggattacaggtgagcgccaccacacccggctaatttttgtatttttagcagagacagggattcaccatgttggccaggctggtctcgaactcatgaactcaggtgagcctcccgcctcagcctcccaacgtactgcaattacaggcatgagccaccatgcccagccacacctgacttttgagaaggagtcactcatgggtgaagagaggtggtaaaaggatccaggaagccatgcagagcccccagccctggcgtccatcacctgatccccgagcctaggatacccagcagcccagagctgcacgagctgcattcctttctctggttaacaaaagggatctgagtgtaaggggccacaccaggaaattccagcctaggacagggttttccttctcactctctccaggttcacaggggttacaggtgccagatctggcttatgcctctgggaataaagcaagcgatccgtctaccaatgtcccaagtaaatgatcccctggctccacgctgaggatctctaaacaccaaggtactcacagagccagacccttctcaggtggcccgctttcaagccccaagacccagttctcaccacatcctccctggcaagatcaaagtgtacagatgaataaataaaacttgtacaattaaaacctgcccagcatgtactcagggctagggcacagcttatcatatcatatatctcactgaattctcagaaaatgctctgggtgaaaaatggaggctccagtcaggcacagtggctcacgcctgtaataccagcactttgggagaccaaggtaggtggactgcttgagctcaggagcttgagaacagcctgggcaacatggcgagatatcatctctacaaaaaaaaaaaaaaaaaattagccaggtgtggtggcacgtgcctgtagtcccagctactagggaagctgaggtgggaggatcactccagcctaggagatggaggttgcagtgagccgagatcgtgccactgcactccagcctggacaaaagagtgacaccctgtctcaaaaaataaataaataaatacaatggcggctcccggtgaggcatgaagggacttcatggacagcccttgaggttcccaccctggtctccctgccttcactcttgtccctaaatatccaccttccccaggacagcctgggttgttatgaaccagaactcagctgggtgtggtggctcacacctgtaatcccagctatttgggaggctgaggcaggaggactgcttgaagccaagacttggagaccagcctgggcaacacagtgagacctgtctctatacatatgtaactaacctgcacattgtgcacatgtaccctaaaacttaaagtataataataataaaataaaataaatttaaaaaggccaggcgcagtggctcacacctgtaatcccagcactttgggaggccgaggcaggcagatcacctgatgtcaggagtttgacactagactgaccaacatggagaaaccccatctctactaaaaatacacaattagccgggcatggtggtacattcctgtaatcccagtactccggaggctgaggcaggaaaatcgcttgaacccggggggtggaggttgcagtgagccaagacagcaccactgcactccagcctaagcaacaagagcaaaattccatctcaaaaacccgctactcagctcgtttgcagtaagaggtatttttagtcctgtctgtatatatgtaatattttccccccagcattttactatgaacattcttaaacctacagaaaagtcgaaagaattctactgtgagcagtcatatagttggtacctagagccacagttaacattttgctaaacttgctttgtcacatatctgtctgtctaaccagatagctaatcagccagccaaccggctacttttgttttgttttttgtttttgagatagggtctcactctgtctcgcagactagagtgcagtggtgtgatcatagctcactgcagcctccaactcctgggctccaatgatcttcccgcttctgcctcccaggtagcttgggccctacaggtgcacactactgtgtttggctaatttttaaattttttgtaggcgtgagggctccttatgttgcccagtctggtcttgaactcctggcctcaagccatcctcccacctcagcctcccaaaatactgggattacaggcctgagccactgaacctagtttttttgatatctgaaacttccttcgaaatatattagtattctttcatgcacccacttccaagtaaatcattagctagagtttaagatctgtttacacttctgagttttttgcttaaaatttacatacagtgaaattgctgatctcaagttagcatttgatgaatcttggtaaaggaatactttaaacccctgtcaagatatagaacactgcaaggacgccaggaagttccctcgtgccccttcatgatcagtctctgtccccacccaccaaggcctgatcttggaccgttgattaaagcgttgaaactccattttctttccatttctccgtcatgctttcagtcatttaataatcaggtgttgtgccaggggctgagctagaaagaaacagaccttgaccactgccctggaggagagatggaaggtgggtggcaggcagttgaaccaacaactgcaggatggacagtgggggctctgagggagggaagtgctgggagttgtgggggctgggagagtggtccctgactcagcctggggctccagggctagcatccagggaggagaggggatgctcaagtctaaggaatgcgaggctctggccaggtgaatatgtttggaggtggtggggtgggagggtgctcctggtagagcaactggcatgtgcaaaggtccagttgagggagcttgtgggtgttgggaatcacttggaattcggcttggctaggctgggtgcagtggctcatgcctgtaatcccagcactttgggaggccgaggcaggcagatcacctgagactaggagctcaagaccagcctggccaacgtggtaaaaccccgtctctactgatcataaaaaaattagctgggtgtggtggtgcatgcctgtaatcccagctactcgggaggctcaggcaggagaattgcttgaacccgggaggcggaggttgcagtgcgccgagatcgcgccactgtactccagtctgggcgacagagcaagactctgtctcaaaagaaagaaagaaaaaaagaattctgcttggctagattggaagggctaggatgtaagcgaaaagagaggcaagagtcagcatcagagatcaagggtgcaattatgtgtcacaataaggacttggaattttttgtttgtttgtttgttttgagatggagtttcactctgtcaccaaggttggagtgcggtggtgccatctcagctcaccgtgccctccacctccggggctcaagcgatcctcccacctcagcctcgcaagtagctgggaccatagttgcgtgccaccacgcccaagtaactttttctgtttttggtagagatggggtttctgtatgttactcaggctggtcttgaactcctgagctcaagtgatgccctgccttggcctcccaaaatgctaggattacagggatgggtgaaccaccacatccagccaggacttggaattttaaccctactgtggtgggagctgaggaaaggtttttcaccagtggaatgacacactcaggttggacaggttgtggaagatcctcaggctcaaaggaagaggatacattggacatgggggtgaggtcggtggcacttaaaaagcctttgcaggcacccaggcaggtagagagggaggctgagccaggatattcccctgtgcccactacagcatcaaaaaccagaaaaagggccaggtgcgtggctcacacctgtagtcttggcattttgggaggcttaggggggaagatttcttgagaccaatctggtcaacatagtgagaccccatctcttgaaacaaaaaaacaaagaaaacagacaagttgatgggcaaagggcatgggcaaagattctggggtgtgctccagtagaggaaacggaggtcctgggcagggaggcattttgcacagttggtaagcaacagggcaaacaaatcaccagtgtttacgttatactggcaaatctcttactgctggacatttaggctccgtctaataataaggataacagctgggtgcactgtattatttatttagtcctcacagtagggcaggatgatcagtctccccacttgacagatgaagacactgagggtcagagtggtgatgtgtcaggaaccctcccactgggttctcacgcttgaaacacagattgctggtccccacccacacagtttctgatgcagtaggtctgggtggggcccgagcatctgcggttcccaacaagttcccaggtgccaccgatgctggtgacagagctgcgtttgaggatcactgctctaaacattattgctgctgcacgcattgcctcctgctgggtgcaggggttgtggggggcactttggcagtgcagagcggaggtaaccagcagaaaacccgttagaactaaaagctgagagtgtttctgacaaacaggtcaacatgctgaaagacccagacaaggtccttaaactaccctgcgctccaagaatcagtgcctggggctgccgtacctaattggttcaaaccacagggtttctggccagctcatctggtaccaaacgtagatgtcaatatggtggatgccaaagaacacatcactctgtttggatgaatcaggcttttcctccctctgccttcagccaggacttctctgaattgttttcatttcaaatgaaagagggaccagttcacaagctgctttcatgctatctgggacaggagttactgtatttcagtgtctgaggctgggaaaccccctggaggtggctctgtcttttgtacctagtgtgtgatgtcaaaagattctccttggtttgggttaaatgacatgctccctggattacaatccagtgccccatgattttttttcctccttttttattgtcaatccttgacctacttcagaagttagttgtctttgttgtcaagtaaggccttccacgtcagatagaggctgtttccaggccgggtgcagtggctcatgcctgtaatcccagcactttgggaggccgaggtgggtggatcgcttgaggtcaggagtttgagaccagcctggccaacatgataaaacccccgtctgtactacaaatgcaaaaattagccaggcatggtggtgtgcaccatgtaatccccgctatgtggcaggatgaggcaggagaactgtttcaatttgggaagcggaggctgcagtgagctgagaacgcaccattgcgctgcagcctgggcgatgagagtgaaaccgtctcaaaaaaaaaaaaaaaaaaaaaaaggctatttcctttttttttttttttttttttttgccagtgaaggggggaccctgtgttggcctccctatcggtcacttgagataatctgaaaatctgtgtttagatccatagaagagaggcggcctgaggagaagaatttgacaaagctctttgagtgtgcaaattagaaatggcaattgctgggcgcggtgggtcatgcctgtaatcccagcgctttgtgaggccgagataggcggatcagttgaggtcaggagttcgagaccagcctagccaacatggtgaaaccccatctctatcaaaaaatccaaaaattagccaggtgtggtggcagatgcctataatcccagctactcaggaggctgaggcaggagaattgcttgaacctgggaggtggaggttgcagtgagccgagatcgggccactgcactccagcctgggcgacagagtgagactcagtctcaaaacacaaaaaacaaaaaactgtgcagtgttctgtctgtcaatgtccttgttgcatttgcagggcaggttttctaccagtggctggggacttagttttactgggccgagggaaggttaggatttgagggtcttgttaagctggatatgggctgcatttcaagcctcccctggctgtctctatcctgcgtgttgatgccaaggctgaagaagactggatttgcaggcaaaagactgtcatttgaggcctgttttcaccccttaatcactgtgtcttggtatgttgtgggggttgaggtaggcagaggttagccaaccttttctggaaagggctggctgataaatacttgaggctttgcatcccatacactgtctgtggcaacccctaactccgctgtgtagctcaaaagctgccatactcatttataatacataaatgaatgggtgtgactgttccaatgaaactttatttataaatagctggtctgtgggccatagatgcttctgatatataaagcatctggtatagtggtgtattgtgaacccactggggttttttcccccccaaacacttgagctttattgatgtatattgacaaataaaaatggtatataggttgggcacggtggttcatgcctataatcccaggactttgggaggccgaggcaggtggatcacttgagctcaggagttcgagactagctcaaggaatagagtgaaattctgtctctacaaaaaatacaaaaattagctgggtgttgtggtgtgcgtctgtagtcccagctacctggggggctgaggtgggaggatcacttgaacctgggaggtcgaggctgcaaagagctatgattacactaccgtgctccagcctgggtgacagagcgagaccctgtctcgaaaatatatttaaggtgtacagttttatgtttccatataccagaggctactgtcactgcttctattattattactactactactactcatgttaccctttctttggctgttactttgtgccaggtactattctaagtacttaccatgtttgatctcatttaatcttcaccaccaaggaactgacccaaggtcccacagctaggaaatggcaagctgggattgagccgtgccagctagccccgtgctatgcactgcttcacacagaagctgcccctccacccctgccgccttccttttcctttgttcctttgttatcagctggccgtttccagaaacggttggttaacctctgcctacctcaaccctcagtgattaaggggtgatatcgggcctcaaatgactgacctttttcctttgttgcagctctcactgattgtaattctgattgtaattatatatttgtttgcaccgtggtttacttactgtccatcttccccagggcaggaggctgaatggggcaggggtctcgctgtctcgtttgcagctccgtccgcggcacttcacccacatcctggcctataagcaagtcctgcccatatatttgaccaataaataaatgaatcattgacagccgtgccccaccccttcctcctctctctgccagccagcaccttggtctttcacagtgggtagagggcttgggctgcaggtgaaatggatttgcaattccctgataacccacccgccgactgtgggagtgggcaggaaggtgtcagctcttccggatgaaaaaccagcctgcaatgcagtgtttctacccagcctacaaagcaaacaccactacctccacgccttaggttggagaaattccgctttacgacacagtcccatgggcctcatgtcatttgtccctcctggcagtcccgggggataggtcgagcaagcagtaggacaaacgactcccattttccaggtgtaaaaactgaggcttggaggtgaagggacttgcccaaggtcatcagctagaatatagcagggctgggattagaacccaggtctgtccgggtccacggtctgatctgaactcggcttcagttggtctggaatgcaccggctgcatctgatgatcttattaaagatctgtggctgtcagggtcctccccctggaggtgctgatttagttggtctgggttggggccctaggcacttggcacttaacaaactccttaggtgattccagtggacaggcagggctgggaacttcatcacccctccgagccccagagcggagcctgatccttagccctggctgtgtatttgaatcactggaggagctttttatttagccttttatgatggaaacataaagtagacagcctaggataatgaactaccatgagctctttttcttttctttttatttatttttgagacagggtctcactattacccaggctggagtgcgatggcacaatctcagcttgctgcaacctctgcctcccgggttcaagccattctcgtgcctcagcctcttgagtagctgggactacaggcacgtgccaccatgtccggccaatttttatattttttgtagagacagggtcttgccatgttgcccagactggtctcgaactcctgaactcaaagcagttctcccgcctcagcctcccaaagtgttggggttacaagtgtgagccactgcgcccagctgccatgagctctttaccatgcattgcataggtgaacgttttaatatgtatctctgaaggacatggatttgtttattttaaatgactttttatttcgcaatagtttggctcacaaaaagttgcaaaaataacagagttcctgttgttcattgctcaactttctctaatgataacatctgaaagataagaattttaaaaactgtaactgttgggctgcatgtgatggctcatgcctgtaattccagcactttgggaagctgaggcaggaggatcacttaagcccaggagtttgagaccagcctgatcaatataggtagaccttgtcttgacaaaaaacatgtatatgtgactgtaatactaactttaataataattcattattatcaaatattccagtaatccattgtgtttgtacaatggctcattcttctatgatatcattctttatgttttagctgggatttttttatggaaaagagtttccccttcatttctttgatcactgatcactctgtggtgatcgaataaatgactgttttcctcagggaagccttctccaaccctggtgaaccaaatgagtacatttgggaaaggtggagaaaatacttgtttctttccgctttttctgcgttcaaacaatgacctggttcactgacaacatcagatgtttctctttatttccagcgtcaatatgaaatttgtgtacataaacatgtaaggctgggcgcagtggctcaagcctgtaatcccaccactttgggaagccacggtgggcagatcacttgagtcaggagttcgagaccagcctgttcaccaacatggtgaaaccccatctctactaaagatacaaacattagcccagtgtggtggctgatgcttgtaatcccagctacttaggaggccgaggcgggaggatcacttgaacccaggaggcggagtttgcagtgagccaagatcacgccactggactccagcctgggcgacagagcaagactccatctcaaaaaacaaaacaaaacaaaaaccttgcttggtatgtttcagcctgttgtacttattctccttgtcaaagctcaaattgtccctcttttagcctgcagcggccacttctgcttggctcttgagccttttaacaatcctgttcatgcttagtttccttgttgtccggtgtgacaagatgttcttggcttaccttgcatatttcctgcccagccacttttccaagaaaaatctggaagtttaaaacaaaaacaaagcttcagtgccccagtcgcacccagaaccagcttaatcagattgcctggtgcgggtagggcccggatacagtatttttttaaattttatttttattttgtttgagacagggtccctaggctggagtgtagtggcacgatctcagcttactgcaacctccgcctcatggattcaagcaattctgcctcagcctcccgagtagctgagcttgcaggcacccaccaccacatccagctaattttttgtatttttggtagagacgaggtttcatcatgttgcctaggctggtctcgaactcctgaccacaagtgatctgcccgccttggcctcccaaagtactgggattacaggcatgagccaccacacccagccaggatacagtattttttaaaaagcacgcccagccttgaatggaaaaccactggacgagagtatgccaccttatcgggctctgtaaatgccttatatctgcacaaggctggaactttgagtggagtccttggctaaagctttcattactgcctggtgacctctcttccctctgctgctaaagcttgtgtttcagaatttagacccggatgcatccatgttgaaagccaggctttgtctgtcatcccaggagctctgtatcggtccctttccttgcctgcatgttgttgacttggggctcatcttcatttctctgggaaatgagttctttgatagcttgcttagaatctctcagtacttcccattgcccttagaatgaagaccaaaatatgtggcctgcagtgtagactgtgcacagcctccagtgtagactactcaggccccttcttggttcctggagtctaccatgctttcttctaccaccgggcctttgcacacactgctgtctgttgggaatgcgttgcctttccttgttacttagttctcatctactcacccttcaggtgccagcttgactgtctgcctcgggggcgccttctctgaccttcgtacaccagatcagcccccatgcacttactttgtctcattggtaatatttctctcccttcaggacacacatcaaggcccagaagttgtagttttgcatttgttcatgtgatcatttgatgcatgtctctctctggagcctgactctttggggctcacatcctcactccaccgcttttagctgtgggaccttgaacaaatcttttcatctctggtccccagtttttaagttaaattaaattttattttatttttattttgagacactcttgctctgttgccaggctgtagtgcagtcgttcgatcatggctcactgcaacctccgcctcctgggttcaagcgattctcttgcctcagcctcccaagtagctggaactacaggcgcctgccaccacatccagctaatttttgtatttttaggagagacagggtttcaccatgttggctaggatggtctcgatctcttgacctcatgatctgcctgcctcggtctccgaaagtgctgggattacaggcccagtttcttttaactgcaaaacagggatgatataatacttttatttatcttgtgaggtgaggatgaagattaaataaggtagtttgtgtaaagcacttagaaaagagctagctactaatagtagagaatcttggcaggtattactgatgattactgcagtagaccacaagctccatacaggcaggggtcatttctgtttgtttagatttgtatgcagggtgcttggcacaagggttgtgctcaggaaatacttgttggatgaacgaatgaatgaagtggagataatagtaataccatgtttatagaattccatgaggatataaaataatgcaagtatataagctcttggtagagtgtctagcacatagtagatggtcaataaatattcagtgactgaatgagtaaagtggggacaatagtaatacccgctcatgaggttgtcgtggggatataaggcaaccctgtagtaccttgtagaatgcctagcacatagtaggtgctcagaaaatatttgttgaatgaatgagtgaagtagggatgacgttaacaccaactcctagggttgttgtggggatagaagacaaggcaggtctatagcatgttgtattgtggttgcacatggtagacactccgttgattgaaactggaagagctgccatgaatttctttctcctggctattaggagagggtccttttggggtgcagaatggtgtggagctgacgctagtcctctggaaggaagagtgagcagctgactacttgctaagctctgacctggatgaaaagtcaaatcattcctttccctcttcctcccaaacctgtgctttctttccactagaatccctgcccagagtccagcgcttccttcctgtcgaggatcaccttctggtggatcacagggtaaggccaggccccccagacctcagggaggtggtggggagtgaatgaatgaatgaatgaacgaatgaacatgctcagctccccctccccaacttctccctcctttgctcttctgcagagttgtcttgaatctgcctgtgctggccatgtggtctcagagacaccaactctgtccggcagttccgtgaacttgaatgtgataaacacgtgagccgtgagcagctgacacctctgcagaaggctttgcctgggacagccatatgctggactgcttttgctttagcttcagatttgggtttttaaaatattaggtatagttattattgacattgtccccctcctgtcccccacgccttagaaaaataatactgtctcaccacaggaagtgtgggttaaaaaaccacatgtgcagatcagcagtgcaggagacatctagaggtaaccagtgtcaccattttagtatgccttcttctggtcgtctttcttttttttttgagacggagtcttactctgtcagtctcagctcactacaagtctccgcctcccaggttcaagcgattctcctgcctcagcctcccaggtagctgggattacaggcttgcgccaccatgcccggctactttttgtatttttagtagagacagagttttgccatgttggccaggcttgtcttgaaactcctgacctcaggtgatccacccgcatcgacttcccaaagtgctgggattacaggtgtgagccaccatgcccagctaccttctggtcctctttttgtatatctttttctgcccgttgttaacatcttagtggggattgtttgaagaatctttttttgcccctaataagcatcatcttttttttttttttttttttttgagacaggctttcgctctgtcgctgaggctggagtgcagcggcacacttgtagctcactgcagtcccaatctactgggcttaggtgatgctcctgcctcagcctcctgagtagctggggctacaggcacactcccccatgcccagcagatttttgtactttctgtagagatggggtttcatcatgttgcccaggctggtctccagcttctgagctcaagtgattctcccgcctcagcctccagagtgctgggattacaggcgtgaaccaccatgcccggtctcatccttgtcttaatgacaaacatcgttttaaaaaattagatgttttaaataatttcttcaagttactattaaaaagcatcactgggacagttgatgtaatttgttcatgactacaggaccccggatgcatgctaataacattcattcttgttttggaaaattgtgctctagttacataagagcatgtcctggattggaagagaatacctccagtttttcttgggtaaaggcatgtagaggctgtatgttaactttttttttttttttttttttttttgagatggagtcttgctctgtcatccagggtgcagtgcagtggcaggacctcagctctctgcaacctctgcttcctgggttcaacgagattctcctgtctcagcctcctgagtagctgggattacagggacctgtcaccacatccacgctaatttatggtatttgttaagtacgacgactggacgtttcactggtggtttgtccagcagcgtggtcctacaaacatcccttgcagttcatcgtgatccaacacatcgtctaggcatcccaaggctgcttgaacatcacaggtgtgacaccacacctagcaaaccccgtaaactgccgaaactaggttcaccgaaaaaagccagaatcgcgtctgccatgatgactgaatgttataagaaatgatcacctgtcacaacagatacaacacaagacgaaatgaagactcgaacgagagttataatgtgtctactggttttcttttaacatgactacctatccatctgatcttacttcagattcttgtgcgctgtgaaggtggtgggatttctcagtgtgtgtgtgattgagaagtgccctcagggtggctagctgggatgggggtcagccccaatggtccctggggactgaggcccctcaagatcgctgccgcccaccacccctgtatagcaggcacttaagctcaggccatctggtatcagtggcctgttgttctgcttcccaagacccctctcattaagaggggagagtatcaggcagcaggtccttctgctgccgacagctccacagtgagcccagctgtgtcctggctggagggagctgagaaaagaggggaccggaggcctcctcctggccccttgcccacgtgttctggccagcgtcaagtgatgctgtgcatacagacccaagccctgtgcatagccagcctgtcaaagcataagtggccaggcctggcatggtggtttacagctatggggaggaaccagtcctgccctactgcagcattcagacaactccagcaagctggcctcggcccacttgaagacatccatcaattggaaggcatattgttcattccatgaactggccttatgggggcctaatcatcttggctaactggaccaattttggtaaattatccctcagcagggcaccatggggggacttcagcaggttctctatccataatggttttggttgcccgcctaactgcccgagatgcgggtggtcccttcagctacttcagcttcagcctgtgcccttctgagtgtggcaccatggtggactcacctctcgcgtctaagctcgggcctcctgcctgcagaggtgcctctggggtccttggtgctggtcccaggttctgtttctgcaaggtcaagagagtcctgtcacgcaacacggcccagatacccactttgacacccactgactatgtggccttaaccgctctgaccatccatttcccctgatctggctcctgccacatctccagcaacctctctcaacaccccactctgagttcttccaggaacatccttcaggcattcactcactcattcatttcttcagtcagtgataactgagcacctactatgaacttgaggttggaaaaacagcatttaacactgtacaaagtcaagttacctctgtttcccccaacagccttgctcaagcagttccttgtgtctggaatgctcttttctggctaactctcacctaccctcaggtaccatctcccctaggaaggacacctccccaccactatcccccaggtgtggccagtaactgaaagcaaatctgtagtagtttaaccacagacctgtaagcaacaagtaactgctactgtaagctgctaggatttggggggctatttgttacacagcatcatcacagcaaaagctgaccaacacaaacaggcaagttctatcttcaagcttcaggactgtgacattgtgaatcaacacttaaggttttaaccaggttgggccagtgctaagcagatgttctcagaagaagcaaagcctgagattgagggagacctggatgtgaatccttgctttgtcatgaagggatagtgtagagggtagcaattaaaaaacacattctctggaatcaagttgcttgggttcaaatcccagtgctgccacttacaagccatgtaacctgggactagttccttaacttctgggcctcagtttcctcatctgtgaaatggaaatgattctagtaccagcctcacaggggcattatgttgattaaatgagctaacctctgtgatgtgctgttagttgctacttttcagtcattgtgagtgagcttggcttggcaactttacttccagaaccttgccatgtatccagcacactgtttttttggattattagaaaccctagctagcatggtgtagcttgctaggcatcaaagtctttcttgggctgtctccatagcaactgcaagcatagactctggagctggacatactcaagttctaatcttgtgaccttgggcaagtgatttaactctctttgcctcagtttgctcatctgtaaaatgacagcaataacttcacatgcctctggggcatgtgtgagaatcaaatgaaatagtgtattttttacagaagcacttagcacaacccctggctcatggatgatgttatcggctattcttggagaaaggtgacctattaagagagctgtctgcttccaggcctaggcctgcagacagggtgtggccagagcactccattcatgccagtaggacccttcgagccttttcccccaagggtggcaggagccaggcctggagaatcagcaaagcccacctagtacctccttctcctctatctcctggctgtctggcttgatccagaagacacacgagggcccccttcctctgcagaagctcctggtaggaacccatctctgcgatggccccatttgccagcactatgatccaatcagcctggggcaggatgtggagtgcgtgcgtcacgagaatccgtgtctgggcagggaaggggtagaagttacacacatgtggccgggtgcagtggctcatgcctgtaatcccaacactttgggaagccaaagcatgtggatcacttgaggccagaagttcgagaccagcctggctgacacggctaagccctatctctactaaaaatacaaaaattagctaggtgaggtggcgcacacctgtagtctcagctactttggaggctaaggcaagagaatcacttaaacctgggaggtggagcttgcagtgaggtgagattggaccacagcactccatcctgggtgacagagcaagactctgtcaagaaaggaaagaaagaaagagaagaaaagaaagaagaaaagaaaagaaacaaaggaaggaaggaaagagagagagagagaaagaaagaaaaaaaaaatgtacggccgagcgcagtggctcatgcctgtaatcccagcactttgggaggccgaggcagatggatcacctgaggtcaggagttcgagaccagcctggccaacatggtgaaaccctttctctactaaaaatacaaaaaattagctgggcgtggtggcgggcacctgtagtcccagctactcgggaggctgaggcaggagaatggcgtgaacccgggagccggagcttccagtgagcggagatcgcaccactgccctccagactgaaagacagagcgagactccatctcaaaaaaaaaaagaaaaagaaaaaagttacacacatgtgcttggccagcctcctgagctgggggttggggtgggggtattgtccctggactcagagtggggacagctccccttcttgtgctcctgccgcctttcttgtaaacagcatatccaaatagagaaacagaggggactcccttagcctgtgtctcaaaacaagaagacaaggagtacatctgaccctggccaatcatccaaggcaaagctgtagtagttaaatcacagatccataaggaagaaacacctgctgttgtaagctgctgggatctgggggttgtttgttacatagcattgtcacagcaaaagctgaccaatacaaagaggaaattggactcaagtggaagggggaggtgagataaacttgggttaggactggatgctaagtgcttcctctgcctttgccctgtactgtctgacacatgttcccaaacttactgttccctggagtagcccaccaggcccaatgacctggttgaagacatgctggccaacgtgggcatccagggccgccagggggtcatccagcaggtacacagctgcctttctgtatacagcccgggccaggctcagccgctgcttctggcctccggagagattcatgccctgtggccacaaaaggaacagtggcctgagtcagcatctacagggtgaaactggggtgcccaggctgtggcaggtcagggcacacctgcccatcagggtgaggtacagctcaacatgcctattccctggggacaggcccagcttccaaggcactcgctctcaagccaacaatgcctccatccttacccgacctcacttctccacttcccaagcacgcttcctggaggagttacctacacttcccaatccactctgtctcctcctgctcactctctctatctctttgagtccaactcttgtttccctttctccactgagaccaccatccatttccctattccctcatccagtggcagcttttcagtcctacttttgtattttaaattttaattgttttcttttagttttcattgatatgtaatagttgtaactattcgaggggcacaagtggtatttggatacctgtagggcagtggtccccagcctttttggcaccagggaccagttttgtagaagacgatttttccatggacctgggggcagggggatggcccgggggatggtttcaggacgattcaagcacattacgttgattgtgcacttctattattattattactgctgttgtcgttgttattattgagatggagttttgctcttgtcacccaggctgggagtgcaatggcatgatcttgactcactgcaacctctgcctcctgggttcaagcaattctcctgcctcagcctcctgagtagctggaattacaggcacccactaccacgcctggctagtttctgtatttttagtagagatggggtttcaccatggtggccaggctggtctcgaactcctgccctcaggtgatccacccaccttggcctcccaaagtgctgggattacaggcgtgagccactgcgcccggcctacttgtattattattgcattgtaatatataatgactcaccatcatgcagtatcagtgggagccctgagcttgttttcctgaaactagatagtcccttctggggatgatgggaggcagtgacagatcatcaggcattagattctcataagatccctcacatgtgcagtttacagtagggtttgtgctcctatgagaatctaatgctgccactgatctgacaggaggtggagctcaggcggtgatgggaacaataaggaatggctgtaaatacagatgaaacctcactcgcctgccctctgcccacctcctgctgtgctgcctgcccagttcctaacaggccacagactggtgctgatccatggcccgggggttggggacccctgctgtagacaatatgtaatgatcaaatcagggtaactgagatagtcatcacctcaaatatttatcttttgtattgggaacacaaccatccttctcttctagctatcttgaaatatacaagtaaatgatcattaactataatttcccttgtgcactattgattactttaacttattccttctatctaggccttcttgtctttcattcattcttttaaaacttatttttatttatttttgagatggagttccactctgacacccaggctggagtgcaatggcttgatctcggctcactgcaacctctgcctactgggttcaagcgattctcctgcctcagcctcccaagtagctgggattacaggtacgccaccatgcctggctaatttttgtatttttagtagagatggggcttcaccatgttggccaggctggtctcaaactcctgacctcaagcaaccctcccgccttggcttcccaaagtgctgggattacaggcatgagccaccgtacccagccattcattcattcttacattcagtcattccactaataaccactgcctcgttatcataaaccaggcatggttctaggctctggagaaacagcaatgagcaaaacaaagttgctgctctcttaatggatccatcattctcatgaaggggacagagacaggcaatccataaacaagtaaggcagacagcacatcaggtggaaagtgctatgaacgaataaatagtaaagcagggggagccaggttcagggggctcacgcctgtaatcccagcactttgggaggcggagctgggtggatcacttgaggtcagaagttcaagaccagcctggccaacatggtgaaaccccatctctactaaaagtacaaaaaaaaattagccagttgtggtggtacatggctgtaattctagctactcatgaggctgaggtgggaggattgcttgaactactcatgaggctgaggtgggaggaatgcttgaactcaggaggtggaggttacagtgagccaagattgtgccactgcactccagcctgggcaacagagcgagactccgtctcagaaaaaaaaaaaagaaaaaaagaaaaagcaggtgcaggtgtagggtgcactaacaatagtagggtggctgtggtggtagataaggtggtcaggaaaggcctctctgtgaaggtgatagaagtgagggatgagccctggggactcctggggagagctttccagcagagggaacagcagtgcaaaggccctggggccagagtgtgctgtgggggatcagggaatatcacagagactaaggtggctgcagtaaagctgagaggtgatgatgggagatggggctaatggataccagagccaggtcacagggaccttgccagggattgtcatgacttgggctttgtctctgaggtaaatggggagatcacctgaggtccggagtttgagaccagcctggccaacatggtgaaaccctgtctctactaaaaatataaaaattagccaggtatggtggcatgtgcctgtaattccagctactcaggaggctgaggtgtgagaattgcttgaacgtgggaggcggaggttgcagtgagccgagattgcatcactgcatgccagcctgtgcaacagagcaagactctgtctccaaaacaaaacaaaaaacaaaaccacaagtggtgggctggatttggcttggggtcacagtttgccaacccctgcccaatccatagctccagatgcatatatcctgtttcttggacatctctgtccagaccccttggtgaggcccagagaggggaagcaattacaccaacattactcagcaaggcagggcagagtaagacaggagtctaggtcttctcactctcagttgtcagagagctcctcactgccaatccctgccacaactccctgcctctctctttgtgtctatttctgcttatcaattagtgattacgtattgagcacctagcacgtgcttgacgctgagctgagccctttttctccgctacttccctaaccattcctctcatttctccatcatactgcccatgatgagtcggggacccaaatgactcccaactgcaatgtctccctgtcccaaaaagacccccaaactctcacctgctccccaattgaagtgtggattccctcagggaagctgtccacatctggctgcagggcacaggcttctagtactctctccagccagggtgggtccagctcctgcccgaagcacacattctctaccacagaggtgttctgcacccaggcctcctggggcacgtaggccacagcaccctaaaacacaacttactttggtcacaggaggatgatggggacagaggtgggataggttttgaggagcagtgggagctgggctctcagtggtgggtgagaggtggagagaatgagtgaaagtgaacttggctgggatggggagggtgggaaggcagcgaggaagtgggactttcaggatggggacatcctagcagacaggctgggggtggcctcacctcgatgctcacgaacccctccacctttgacagctccccaaggagggcggacagcagggaggacttccctgcccccactggaccgacaacagccagcagacagccctggggcaccgtgaggtttattctggacacgcaagaggggagacatgaccttggttagggttcagcccgcctctgtgaggaaggatgagccccagacggagctgagctttcctgctctgggagtctccaagaggacctgtggggctgttctttttcccagtccttgtctagctatttgaggaactatcctgtgcacatttgtgcatgtacacatgcacacaaagcgtgcacacatgcatgcacatttgcacactcatacaagcatgctagcatgcacagcaacacaatgtgggcacgcatccacacacacacaagtgcatgcacatacccaatcaatccatgctcacacgcatacatgtgtgcacacatgcacaccacgcacacacacacagggttgactatagcctgagggtttcaccagcctggcctcctgccttggctcttgcgataaataggctctttcctccctccctcccgctactcttggtcccgccccactcctgtccacgtcccacagcccatcctccacccagtgaccagagggatctgttaaaacccaagtcagatcgtgacacttcccagctaaacccgccagcactcccatttcactcagggtcaaagctaaagtcctgacgatcaggaatgacatctcccgcctccttccgctctgtgcctcagctgctcggccctggccttgctgacctccttgctgtttcttgaacacaaaaggccagtggttctcaccagggggtgactgcatcccccaggagtcatttggcaagatctagagatatttttggatgtcacaaccagtagggggtgctgctggcatctagtgggtagagactggggtcagctaaacatcccacaatgcacacgacagcccccaacaaaggagtttcagcccaaaatatcaaccgtgctgaggttgagaaacccaggtccaggcactctcctgccccaggacctttgctgatgccattcccaccgcctagaaggttcttctcccaggccgggcacggtggctcatgcctgtaatcctagtcctttgggaactgaggcaggtggatcacttgaggtcaggagttggagaccagcctgacgaacatggtaaaacccatctctactaaaaatacaaaaattagctgggtgtggtagcatgcgcctgtaatcccagctactcgggaggctgaggcaggagaattgcttgaatccggaaggtggaggttgcagtgagccgagatcatgccattgcactccagcccgcgtgatagagcaagactctgtttcaaaaaaaaaaaaaaaaaaaaaaaaaaagaacagctcttctcccagacactccttccttatgatctcggcttgaatgcaaagccttccctcgctagacatgccatcgtactctgttcccttgctctggttttctgtttgggcctcacctctatcagcatgtcaccccacgagagcagggcccttgtctgtttccttcgccctatccccaatacctagaacagagcgtggcccatacctagtgctctatcgatgaagtgagtgaatgacaaccaatacaaatactacctggggcatattccttctcttcttagggagtttcagggctgtctgagatttttggccacaaagaccaagcgatagagttggagactatagatgatcatgacctcggactgatacaggaggcacagaagtgagcacagctgatagggctgaaccttggggctcctctcagccagccctcccttggcatcgtcttggccagcctgggagcacaggggtgtctccccctaatgggggaggctcagatgccctggtccccgtctgcaggagatactggtctatgctgtgcaggtccccaccttcaggaggtagagatgtatcctgagaacctccccggcagagccccagcccagccaaacccaccctccagtcccaggctggaaacctacaccacctctcaggtgggaggcagcaggagccccatgcatcttctccctaaaaacatgaggctggttactacgggtgtcgttctgtacctgtggaggcagggagggctttcctgggaccaggcgaaggtggcactgtgtatggtgatgcaatccttcccggcagctgcagggcacaagaggccatttacaggagacccctgacctggccggcctctgcatcggagaggcccccaggcaccatcccccgcccccccaggggcagaggctgcaggaagaaatctctcccactgaacaaattgccctgctactcactggcttctgggtgaccccgcagggttcttgttctgtctgtgtcccatggctacataatccagggggaggcaaactgtggcccagagaccaaatcctgcctgctgccttttcttataaataaagttttattggaacacggccacatccattcatttctctatttcatgctttgagcagttgtgacagagactgtgtggcccacaggcctaaaatatgcacaatctggtcatttatggaaaaaattagtgaatttctgaaataaatatcatcaaatcccagccttcccagagtgaagggggtgttattaatttcactgtggccggcacagtgtctcatgcctgtaatcccagcactttaggaagcagaggtggtaggatcacttgaggtcaggagtttgagaccagcctggccaacatggcaaaaccctgcctctaccaaaaaatacaaaaattagccaggcgtggtggtgggcgcctgtaatcacagctacttgagaggctaaggcaggagaattgcttgaacccaggaggcggaggttgcagtgaaccaagattgcaccactgcactccagcctggatgacggagtaagactgtgtctcaaaaatactactgctactactactaattattattattatttcactgtgataacaagtgtaattagattagtggttcttgatccttaagacgtagttagaattgcctgaaagattttctaaaaatcaaagctctcatggcttagcccagatcaattaaattcatcgtcacaattagctgctataacgattaacatgcccattttggagatgggaacacggaagctcagagagatgatctacttgtcaggatcacccagctagtcagtgctggggctgggatttggacctgggcagttgaatgccacaggctcggcttcttaccactatgtgggtgttttccaggtacacagtttgcccaggttcttcagtgcaacaagggggagggtgtcttggcccgtggcataaaagaaggatggggtggagggggaagcccaggtaacttgagcttggtaagtctcatcgtgcaatggtgcttgaaatgctgctattttccagcttgatcaaaatgctgtcatgcttattacctgggactttctgcatgaggacaaggacctggtctgttagagcaggagtcctcaacccccaggccacagactggtaccagtctgcagcctcttaggaactgggccatacagcaggaggtgagcgcagggcaggtgagcagagtgtcatctgtgtttatagccactccccatcactcccatcaccgcctgagctccacctcctgccaaatcagcagcagcaatagattctcaaaggagcacgaacacttgtgaactgtgcatgtgaggaatctgggttgcgtgttccttataagaatctaatgcctgatgatctctgtctcccatcacccgctttggggccatctagttgacggaaagcaagctcagggctcccactggttctacgttatggtgagttgtataattatttcattatatagtacaatgtaataataataaagggcacaataaatggaatgtgtttgaatcatcccaaaaccacgcgcctctccccggtccgtgggaaaactgtcttccacaaaaccagtccctggtgccaaaaagcttggggaccactgtgttagagtgttccctgttgtacacccaggatggtacaaagtgggcgctcagtgagtggtcgctgaatggctagcagaaagaagagcagcacggtgccagtttccaagtgacacgcagatggcgtgatctgcacgtgtcatccattgcccgcagcccccatctccccccagtactgatgctggcttgccattatgggccggggtggcccccacatcccccatccctcccacacccctcctgccagactcagcactcaccgcttccagaggaacttgagtctacgacaccagggtcaacttcttccaggcagaggaaggtgaccagacggtcaaaggacacccgggcctaggaaaaccgaagccgcaggtcacccagcaagaagagcaaagaactcaggttttgggtgtcggtgtctcaagatgtgtggcaacagcttcctgtctaccaagctctgtgcataggaggcgtgaggacaaagctttctagttcatgggaaacgatgcaacccgagtggtgaccttgatggtggtgatctcccacctctgcgatcctacaaatcagtgacaccgaagcaagccagctgccattctgcagacaagatctgggaagaggatggtggcttttccaataaggttatcaagccattgtgtggaacaatttcaaatgttgtccacctgggggcgctctctcccagtcacaaacccatctttggggaaactgtcacaagaacagcatggaggtaaccacccccatgattcagttacctcccactgggtttcttccatgacatgtgaggattatgggaactgcagttcaaaatgagatttgggtggggacacagccaagccatatcactgtctctaccaaaaaaaaaaaaaaagccaggtgtggtggctcatgcctgtatcccagctactcatgaggctgagatgggaggattgcttaagtccaggaggttgagactgcagtcagctatgaccacaccactgcactccagtctgggcaacagagtgagacgctgtcaaaaaaaaaaaaaaaaaaaaaggaaatccattcttagcctgtgtgctgtacaaaagcaggcagcaggctgaatttggcccacaggctgtggttcgccaacttatgacctatacaaatggcaattcatatggttcatcctagcgataactgtacatggtgtattagatactatatagcatgttcatatcaaatgtcatataatgtataaggtaacatatacagtataaaatagtgcctgagaaatatttgatgaaaaaatctgataagtacttagcaggcacagtacaaagtaccatgaagttgttaaatgggggatcagggtgtttgagaaaggggtggggagataggtgggcctccctcaagaaggaatgtttcaactgtgagctgaaggatgcccctgcattgcatgtcagggcagtgatggggagaaagactccaggtagagggaacccactctgcaaaggccctgagtcatgaaggggtccctggaacagtgagttggggctgaacccacaagctgcagttgtggggattgtgatccatcctgagagctctgagaacctggaatagttttcagcgcagtgtgaagggactggggctgtgttttgaagatatcccctgtctgcggttgggaggggagtcaggaaacctatttggaggctggggttttcacccaggtcatgcagataagatttattaggtgtggaatgaactgagcaaatcacatgtcttctaatggtacaccacactttttttttttttttttggttttgagacagtcttgctctgtctcccaggctggagagcaatggcatgatcacggctcactgtagccttgacttcccaggttcaagcaatcctcctacctcagcttccggagtagctgggactacaggtgcccactaccatgcctggctaattttggtatttttattggagacggggtttcatcatgttggccaggctcctctctaacttctgacctcaagtgattcgcctgcctcagcctcccaaagtactgggattacaggtacaagccaccgcgcctggcctttagtgatattttaaagactaaattcccttagagatgcctgggtctgcatttattgctactgttctgtttctcactgtgtgtcttgaggtcatcaaaagtaacctgggccttttcccttgttttctgcctcctctaggcttatgagccattaagcaaagccggattggtgtgtgggtcaggctcttcatgttttctttagcttaataagcagtttctaagggaactcattgtgtcattgtttagaatagcaaaagatgagcagcctcccaagtggcaatcagtaggggctgggtgaatacagtgggttccaccccttccgtggtagggtgggatgcttgcagaaggacataagacgaggaagccctttgtgcacagatgtgcggcagcctccaaggtccagtttttaagtgaaaacgtggagatccacttggtatatttggtatgttacctctgtgtaaaaaagcagacaagtaagaattacgtagttgtatttgctgtatttgtaagaaattccagagggataaatgagaaactaaaagaggcaattgcatttgggcagagtaactttttattgtttaccttgatatatactttttttttttttgagatagagtctcgccctgtcaacaggctggagtgcagtggcgtgatcgtggctcactgcatcctccgcttcccagtttcaagcgattctcctgcctcagccttctgagtagctgagattacaggtgtgtgcgccaccaagctcagctaatttttggtatctttagtagagattgggtttcaccacgttggctgggctggtctcgaacccctgacctcgtgatctgcccaccttggcctcccaaagtgctgagattacaggcttgagccaccgcgcccggcctatatatgtattatataaacatatgcacacgcatgcatacgtacacacatatatattttttaaaaattgagtcatggccaggtgcagtgtgggtcacacctgtaatcccagcactttggcaggtgaaggtgggaggattgcctgagctcaggagtttgagaccagcctgggcaacatggagaaaccccttctctacaaaaatcacaaaaattggctgggcgtggtggcatacacctgtggtcccagctgcctggaaggctgaggtgggaggattgcttgagcctggtaggtagaggccgcagtgagccatgatcacgccactgcactccagcctgggtgagagagtgagactctgtcttaaagcaaaaacagagtcatatatttcctattaaggtgaaatttaaaaaataaattcctatattccatcatccccagcttctgccattctaaagcattttcctaagcagctccactgtggatgtagcgggtatttcagaaaggcattagaaatgccctgggagggcagaacccggggcttcactggaggtgctgttgggctcagtctgatgtcaaggcagggacatggcaagggtattgagatgtgaacaagcattactcagcaaggtgacatgtgttcatgccttgatacacttgtttccccaccagctctatttttgttgcctgctctattggtttctttttcttttttttttcttttgagactgagttttgcttttgttgcccaggctggagtgcaatggcaccatctcggctcactgcatcttccgcctcctgggttcaagtgattctcctgccccagcctcctgagtagctgggactacaggtgtgcaccaccatgcccagctaatttttatatttttagtagagacggggtttcttcatgttggtcgggctggtctcgaactcctgacctcaggtgatcctcctgctttgggctcccaaagtgctgggaattaacaaggtgtgagccactgtgcccagtctctattggtttcttattgctggtattgccatcaacttggtgactgagaacaacacacatcactctagttctcgggagtcagaggtccaaaatgtacggctggtgttctttccggaagcttgcagggagaatccatggcctggccctgtccagcatcaagaggccacctgtcttcctcaattcgtggtttcatgtccctccacccctgcttgtgttgtcaaatctcctttactttttttttatttttgagacggaatctcagctcactgtagtctctgcctcccaggttcaagtgattctcctgcctcagcttcctgagtagctgggattacaggtgcatgtcaccatgcctggctaatttttgtatttttagtagagacggggtttcaccatgttggacaggctggtcttgaactcctgaccccgggtgatctacctgcctcagcctcccaaagtggtgggattataggcatgagccaccacgccctgcctcaaatctccttttctgactcagatattcccaccgtcctcttgtcccttataattccctgtgattacattgggcccacctggatcatctaggacaggggtccccaactcctgggccatgaaccagtagcgagcagtctgtggcctgttaggaactgagtcatgcaacaggagctgagtggcgggcaagccagcattaccacctgaattccacctcctgtcagatcagtggctgcattggattctcacaggagcgtgaaccctaacgtgaaccgtgcatgcgagggacctaggctgtgtgctccttatgagaaatctaatgcctgcatgatcatgagggggaacatgtttctagtcctgaaagccaccccctcgccatccctggcaaaactgtcttccatgaaatccatccctggtgccaaaaagcgtggggacctctgatctgggacattctccccattccaaagtccttaatgatacctgcagagtcccttttgccatgaaaggtaagagactcaggttctggggacggggatgtaggcatctttacgggctattctgtgtactgcacctgttcagcttagttccaggcacatagtaggggctcagtacatctttgttgaatgacacaatcaatcatttggttaggctagagaatgtggaaggaggccgggtgcagtggctcacgcctgtaatcctaaggctgaggcaggtggatcacttgagctcaggagtttgagaccagcctggacaatgtggcgaaaccccatctctcctaaaaatagaaaaattacctgggtgtgatagtgtgtgtctgtagtcccagctactcaggaggctgaggcgggaggatcacttgagcccagaaggtggaggtttcagtgagctgagatcatggcactgcagtccagtctgggcaacaaaacgagaccctgtgtcagaaaaagagagaatgtggagggatattatagcaagaagtggatctggaagttttactagtagtggtatttattgagcacctactgtgtgctctggctcatgtttaacaaagtgcttatttgcataatgttagtattcccattttacagatgcggaaactgaggtttagttgctggcctagtattacagggtgaggagctgaagccccatctgcctgacgaggggtgtgttggggatgtggactagaagcttggtcagggagggattctgttcaaacagggctgcttagctttggcactgttgacatttggggccagatatttcccgtcgtgggggctgtcctatgtattgtggccattaagcagtatccctggcctctgtccacagagtgccaatagcactaccctcttcctaagttgtgaaaacccaggatgtttccaaatgttgtcacatgtcccctgagtgacaaacttgcccccacttgagaaccatggtgttgaaacatagatcacggcacatcaactccatgctcctcaggtcaccctgcgtgaaagtcagaatccctgcggtggcctgtgcgtcccgcactgactgtctcctccctgccttcttccttcctcgctgtcttcactgcttgttattcttcagacctgttggcctctctgcggtttctcagaaatgccaggcctggtctgacttcaggacctttgcactggctgttttctctgcttggtgtgcccttcctccagatggccatttggtttactcctctgtttccttccatcctgtatttgtttatttatttttaattgagatggagtctcgctctgtcacccaggctggagtgcagtggtgtgatcgcagatcactgcaacctccaccacccaggttcaagggattctcgtgcctcagcctcctgagtagctgggattacaggcatgcactaccacgctatgttggccaggctggtcttgaactcctggcctcaagtgacccacttgtcttggcctcccaaagtgctgggattataggtgtgagccactgtgcctggctcaatcctgtatttaaatacccgtcctcagcaaggcttgccctcttctctgagtgcttttcatcacacatgtcttcatatcctctcctttctaaaccatctgtctcttctctttaggctgtcagctccaggagggccggcccttggtccctattgttcactgctgggccctcagccctaggaaccgtgctctgtaaatggatgaatgctgtctgtcctgttactgcagtgtccccagacatatccctatgcccagcacatgcctgacccctcacaagaccctggaacatgactaagggatttatttggtgaaacatgagagtctgataagaggagaggaagtggctggggagcaaccttgcaaagatagccagggttggatggagaaaacgagggtgagtgtcagcttcataggacgggccttccacgagaggcctcatggtgcttgggagagttggggtgaaagcaggttggaacaagatgcttgctgctgacatttgggcactgatgggcagcctgacctctgctttctttttagtgcttaacaacactgaagccctgttaagacaggattcttaggactgggcacagtggctcatccagcactttgggagccctgggtgggaggatcatttgagccccaggagtttgaggccagacagggcaacatagcaaggccccatctctggaaagaaatacaaaaattaaccaggcttggtggtgtgcacctctagtcccagctacttgagaggctgaggtgggaggatcacttgagcctgggagttcaaagctgtaatgagctataatcatgacattacactccagccgaggagacagagcaagactctgtctcaaaaaaaaaaaaaaaaaaaaaaaattagttttgcatgtaactgtgttcagttctgtgtcttggacgtgaggatttgtggtacccgcctggatagagcaaggatggccgtgcccctgccttcctgggtgatggggataagtctggaaattgcccctgtgatgttactgggctttattcttagctctgctgagttagggggcagggtggggtgcagcccagccaacagcatgccagggcgcgtcactgcccacgcgatgctggcttcagccgccttcctctcacctcatggccctgccagccgtgcttgcctcctgctgtgtcggggctgggagactttagcctttctccagatgttttcaggagtgcnnggtggggaaatgaaggccacatgctgtctctctaaacaggattaatgttcagaagcccagcgggtgccctgacctaaccacgggcctcttgcactccttttctcagcttcccttggcttctgagctacccctctgcagcgttgtttctgagtgtggcatttaggagcaccctgtcgtcttgcctttcgtccctccaagccccgtctgttccttggttggttgtgcagaagagttgctagggtttgaatccaggacggtcctgcccctgtgactcgcgggccatcttctcacctgtttgtctctgtgttcctctctgtaaaagtgggaatcattacagtaccttcctcatagactgctagggtgataaaatggagcgatgtacatgaaacctgaacgcagtgcctggtatgcagtccgtgcttagacagggctctggttttatttttatttctttttctttgagacttggtctcactctgtcacccaggctggagttcattagcataatcacgtctcactgcagcttcccactcctgggctcaagcgatcttaccacctcagcctcccaagtaggtgggattacaggtgtgagccactgtgcctggcaccattcagcaatttttttttgttttgtttttgagacagagcctggctctgtcacccaggctggagtacagtggtgcgatctcagctcactgcagtctctgtctttcaggttcaagtgattctcctgcctcagcctcccaagcagctgggattacaggcgtctgccaccacacccagctaatttttagtagagacagggtttcaccatagtggccaggctggtcttgaactcctgacttcaagtgatccaccctcctcggcctcccaaagtgctgggattacaggcatgagccatcacacccggccatcagcaaatttttaagtatacaatatagtattgtgagctatagacactattctgtacagtagaccgtaggactgactgactcatcttgtatgaccaaaactttatacgctttgaccaacacctccctgtttcccccaccaccagctccttgcaactaccattctgttctctgcttctatgagtttgtcttttttagatgtcacatgtgagtgagatcttgcagtgttcgtcttcctgtgcctggcttatttcatttagcataatgttctccaggcgcatccatgttgttgcaaatggcaggatttctttccttttttttttagacagagtcttgctctgtctcccaggctggagtgcagtggcacgatctcggctcactgcaagctccgcctcctgggttcacgccatcctcctgcctcagcctcccgagtagctggaaccacaggtgcctgccgccacgcccggctaattttttttttttttttttttgcatttttagtagagatggggtttcaccgtgttagccaggttggtctcgacctcctgaccttgtgatccgcctgccttgacctcccaaagcggtgggattacaggtgtgagcgactgcgcccggccaggatttctttcctttttaaggctgagcgatagtccatggcatgtatagatcatgttttctttgtccacttgaccacggatagacatttagttgtctccatcttggttgctgtgagtgacgctccagtgaacacgggagtgcagatatctcttcagggcccatgtgtggctgagattaggagatcactgctgtcgtctctagttcagcagtgctagtgcctcctggcgtttagcgtccagctcaagggagtggaatttgggtgtctcagggtctagggccacctgtgcctctaaatcgcagggaagctttgtgtgtgtgtgtggtggggtgcggggggctatgggtatgtggtggggtgaatcttatttctcttctttcccttttcttaattttccgttggcaaaacagagcgccactccagacccctttcattcttgcaatatacatgaaaagtacagggcttgttctgcaaaagaagagtagccccagcgagctcagggttgagtgaagttccgcaaggatggcacctctcggctcttctgggggcttcaggacagagctcagtgtcgccaagcaggacccccactgcgggcggagctgcagggccatcaacattcattaggtggatcagtgaatgtagactctgcggtgtcacaaagcagcacctgtactcactgtgcctgtctcgggatggaatctaagtcagacatccttgcatccccacttatgggctgttccttcaccttgctggtcctcacctttctcctagagttacggggaggagtaaatgtgctaaggcacatacacgccgactctgcagtggccttgaaccatgcttctctgtcacccctttcgttgccttgacaatggctgcagcctcctttcccatctcccctaggatcttctcctagggtctcttaatacaggggtccccaatccccagagcacggactggcaccagttcatgcatgccctgttaggaaccaggccacaggccacacagcaggaggtgagtggcaggcgagcgtgtgagacttcatctgtatttacagccgctccccatcttttgcatcaccgcctgagctctgcctcctgtcagatcacctgtggcattagattctcataggagcgcgaaccctgctgtgaaccgtgtgcgcgagggatccaggctgtgtgcttcttttgagaatgcaatgcctgatgatctatcactgtctcccatcacagctgagatgggaccatctagttgcaggaaaacaaactcagggctcccaccgattctacataatggtgagttgtataattatttcattatatatgacaatgtaatcatagaaataaagtgcacaataaatgtaatgcactcgaatcatcccctaccctgtctgtgaaaaatcgtcttccacaaaacctatccttgctgccaaaaaggggatggctgtctttttttcttttgagatggattcttgctctgttgcccaggctggagtgcagtggcacaatctcggctcactgcagcctctgcctcccaggttccagcgattctcctgcctcagcctcctgggtagctgggattataggcacaatggcaccgtgcctggctaatttttgtatttttagtagagacggggttttaccatgttggccaggctgctctcaaactcctaaccttgggtgatcctcccgcctcggcctcccaaagtgctgggattacaggcgtgagccactgtgcctggccagggaccactgtcttaatatgtgaattaggcgatgccatgaccctgcttaatgcactcccagggcctcctgtgagaattagaacaaaaaatccatgctctgtaccatgcctccaagattggctatgtggtggcctttggtgacttctcccgcccaatcttgggtcctagctcattggtgcagccatatcctccccccaccccaccccactgtggcctttgcctgtgccatctttctgcctggtatgtgcttcccgagatctttgcacagccagctcttcctgacccttccagtctgctaggatgtcatctgcccagaccgccactctggtgcttcctgtcctgacacccctgctctttccttcacagcaggtactgctctttgtcattatgttcttatctgtgagctttcatctttgatggactatgagtcttaagaggacagagatatcgtttctgattttcccccatgcctgtgactagcccaggtctaggcatatagtaggtgctcaataaacagtcatcgaatgatagattgaatgaatgaatgcatgacaggaaccctgcacttatctgtgttaatccgtctcttggctgccgggaacaccagctcctgcaacctggcacttgggtcacctgattgaaccctcctgataactctctaaactctgtaataggtgggttctagaattagtcccatttcacagatgaagaaatcaaggcctggtgaggtgaactgacttgctttagggcagcagggatgatttttgcctctctggagatatttggcaatgtctagagacagttttgattgtcataacttgaggaggtggggagtgctactatcatctagtggcagaggccagcgacgccactcagtatcttacaatgcacaggatggcccccgacaaccaagaattatttgggctcaaataccagcggttctgaggttgaagaagccctgcttgagggcacacatctgtaagtggtggagacgggaacctagacctggaaccttgttttgttaaccactaccctgcactgctcacatgcgggggtgggtgggtgggaagagttgtagaatgtttccatgtctgagtcaaaatcttgcttctctgctctagggagatgaatttggaatctgtgaggcctgaggccattcacttgatctccggccctggagatcttgcctccaagcgacctcaggctccatctgtctgccatgtaccttgcaaacaccttagaattctggctgggcatggtggctcacacctctaatcccggcactctgggaggccgaggcgggcagactgagttcaagaccagcctgggcaacatggtaaaaccctgaatctacaaaagatacaaaaattagccaggcatggtgatgcgtgccaggtagtcccagctacttgggaggctgaggcaggaggattgctggagcccaggagatcgaggctgcagtgagctgtgatggtgccagtgtactcaagcctgggcaacagagtgagaccctgtctcaaaaaacaaaaccagctgaccaaacaaaccaaaaggccttagagttcaagcacgtggtttagaggtggtggatctcagtgtcagactctcagtgggttcaaatcctggccctgtttcttctaggttgacgagcccaagcaatttacataaactctctggacctcagagcccttgccaggaaaggggagagttttaatagtcctgactttgtagggctgttggaaagcttaaatggactgtgcttgggaagcacttaatcactgtgcctggcgtgatcactctggctgttattattggcacccaataaatacatgctttctctttgtttccaactcagcatttagaaatgtcctacccttcaattcctgctgctatttatttatttgaagtgcgaactagctttcttattattattttagaaatcatgcagaggagaaaattcaaacagtacgaaagataatacaacaaaaaatagtagttgccttcctctccctggtttcaggcctaccccctgcagattaattagctttttttctttctttttttcttttcttttttttgcaatatgaagtcttgctctgttgcccaggctggagtgcagtggtgtgattttgactcactgcaacctccgcctcctgggttcaagcaattctcctgcctcagcctccctagtagctgggattagggcagatcatgaggtcagaaatgtgacaacagcctggccaacatggtgaaactccatctgtactaaaaatgcaaaaattagccaggcgtggtagcaggcgtctgtaatcccaggtacttgcgaggctgaggcaggagaattgcttgaactcgggaggtggaggttgcagtgagccgagaccacaccattgcactccagcctgggcaacaagagcgaaactccgtctcaaaaaacaaacgaaacatcaaattcctgactgtgtatgctgcttgcaggttatatatgaccaggcctggttctgtatctgtaaaatgggttacgttatagtacctgagtcctagagttgtgtgtgaggatgaaatgtaatgtgaaacacttagagtggtgcttggctgatgcaactaatgaatcttccctcttactctttctatagacagaagaaggcggcacaggtttcttcattgcttttcgccctttgctgaaatgtcatcttggcccagaggccctttctgtctacctgataaagaactagcacctgcccacccaccattatgcttcacccactttcttcttcttcaagccatttgctcccattgggcatacatagagttgttttttttagctgttggtagttttggccgctttgcataaagtgaaattgtgtgagagtggagactttattttacttccacatgaccttggcccatggtagtagtcgctgataaatgtccactgagcaataagaacccgactgttgcaagttacttatttatttatttttgagacagggtctcagtctttcacctaggctggagttcggtggtgcagtcatagctcactgcagcctcgaactcctgggctcaagggatcctccttcgtcagcctctggagtagctgggactaaaggcaaacgtcatcacatctggctacttttaaatttttttatttgtagaaggtggggagtctcactccattgccacctctggtctcgaactcctgggctcaagtgatcctcctgcctcggtcccccaaagtgttgggattacaggtgtgtaccaccacgcccagctaagtttttttttttttttttttttttttgagatgcagtctcactcttttgtccaggctggagtgcagtggcctgatctcggctcaccacaacctccacctcctgggttcaagcgattctcctgtctcagtctcctgagtagctgggactacaggcgcacgccaccatgcccggctaatttttgtacatttagtagagagagggtttcactatgttggccaggctggtctcgaactcctgacctcatgatccgcccgcctcagcctcccaaagtgctgggattacaggcgtgaacccctccacccggccagctaagtttttaaatttttttgtagagatacagtctcactgtgttgcccaagctgatctgaaattcctggcctcaaactatcctcctgcctctgcctcttcaagtgctgggaaatataggcatgagccactgcacccagctggttgtgagttattgagatggttgaattgggagtggatgctcaggcctcagtggaacttgtggtacacagtatgtcctcattacctcccatcagtggcagttgagattcataatcactttttctgcctgttgtctgccccatcctctctgtggccttccctcctgtcctggagttggctggctgggtcccctggcagggctgcatgcgttatccctgcaggcctgcttgccttatccctgcaggccctggtggagcatctgtgcagaacctgtgccatccagatgggagcagtaagggtgtagggcaaagttagtgagctgcccggtgcacgaggacttccatgataatcagggctgaaccaggaaggcaggtcaaggccagggtcatgtacagaaaggaggtcagcaccaggatcttgtatgggaagacttagatcaatgcctagtgccttagtcatcatcattcagcccagaaaacatgacgctatgcaacaggaattttatgaacacacaaaggtcaggggccactcggacttggacggggtccccaactctttgagtgtcagggctgagggcatggagacacaacttgatcaagctggtgaagtgtccagcaaggagaagcctctgttggagggagccgggagctggggaggacatgcgctttctcttttttttttttttttgagacggagtctcgctctatcgcccaggctggagtgcagtggtgcaatctcggctcactgcaacctctgcctcctgggttcaagcgattctcctgtctcagcctctcacgtagccgggactcaggcctgtgccaccacgcctggtgaatttttttgtatttttagtagagacggggtttcaccatgttagccaggatggtcttgatctcctgacctcgtgatccacctgccttggcctctgaaagtgctaggattataggcgtgagccaccgcgcccagccgacttgcgctttctctgtaaagatttctgtgggccaggttccccaaagggcaggccctgggccagtgcagtgaccggtgaccgtgttcaggactcatctcttgtggctgaattgtgtgtctggagagttgggtccttctgattctgctcagagcgtggtgggcctggctggatttccctagattaggaagcagcctcgggtagctgtgattctttgagttgggaacagcaagtggcctgcagactgccagggaatcgtcccttccttgagcctttaggtattgcccattattcaccgtttttcccagaagcctccagtagtgagagtcgcacttcttacctcctggagttgttaaagtaaagaaggacacattagggtccctgccggtaaggaacatccaggaggcctcgataccttttttttttttttttttttttccctgagacagagtctcgctctgtcacccaggctggaggacaatgacctgatctctgctcactgcaacctccacctcctgggtttaagcgattcttgtgcctcagctgcccgactagctgggattacaggcatttgccaccatggctggctaatgtattttttttttctttttcagtagagatggggtttcactatgttggccaggctggtcttgaactcctggcctcaagtgatctgccctcctcagcctcccaaagtgctgggatttcaggtgtgacccactgcgcccagtcccgatactttgtttctttgagacagtctcttactctgtcacccaggctggagtgcctgggtgggacgatcaaagctcactgcagcctcaagcccctaggctcaaaagatcctcccacttcagccttctgagtaggtgggactacaggcctgcactaccacgcctggataatttttaaatttttttggtgaagacagggtcttactttgttgcccaggcttttcttgaactcctgagctcaagcaatcctcccgcctcagcctcccaaagtgctgggtttacaggcgtgagccactgtgcccggtcctcagatgatcttagctttgtgacctatgctgttggccgctgtaggggctgtgatggaggtgatgtgggggtggatggcaggggtgacccgtgttggctgctttctgtaacagtcatagttcatggtcagagtcagatttcctctcgtcatgccttccttcccttccttctgctccctcccacagccgccctttgggtctgggctggccatctggctctgagcaggaagctagcctgtgctcttcaatttgctttctgcaggggaaacaccttcctttgctcagcgtttcctgacctctccttccctggagttccggtgtccttaaatgctctctggtttcttctgtagcttactttcttgcttgaaaggacaacttttctttgtcctttagacttcttatctctgggcaatacagtggtggtggcagtggtgattattatcaactattagtatctgctactacggtttattgtctctagactgtatcagcacctgtcacacattgtcccattgaatcctctccagaactcttccaaatgatgtgttttcctgacttttaaaaaaattaaaaaaaaatttttatatttttttgagacggagtctcgctctgtctcccaggctggagtgcagtgctgcgatctcggctcactgcaagctctgccttctgggttcatgccattctcctgcctcaacctcctgagtagctgggactacaggtgcccgccaccacacctggctaatttgttttttaatatttttagtagagacagggtttcaccgtgttagccaggatggtctccatctcctaacctcatgattctcccaccttggcctcccgaagtgctgggtttacaggcgtgagccactgtgcccagccaaaaaaatttttttaaagaaatggggtctcgctgggtgcgatggctcacgcctgtagtcccagcactttgggaggctgaggtgggcggatcacctgaggttgggagttccaggacagcctgaccaacatggagaaaccccatctctactaaaaatacgagattagccaggcgtggtggcaggcgcctatagtcccagctactcgggaagctgaggcaggagactcgtttgaacccgggaggcagagattgcggtgagctgaaatctctccattgcactccagcctgggcaacaagagtgaaactccgtctcaaaagaaaaaaaaaatagaaaaagaaaaataaaagaaatggggtctcactgtgttgcccaggctggtctagaattcctgggctccagctgtcctcccatttcggtctcccaaattgctgggattaaatgtgtgagcctctgtgcccggcctctttctctctctctctctctctctctctctctctctctctctcctctctctctctctctctctctctgtctctttctttctttctttctttctttctttctttctttcagcctgagtctcgcttgtcgccaggctggagtgcagggacgatcgggctcactgcaagcctctgcttcccaggttcaagtgattcttctgcctcagcctcccgagtagctgggactacaggtgcatgccacaatgcctggctaattttgtattgttagtacagacggagtttcaccatattagccaggatggtcttgaactcctgatctcatgatctgcccgcctcggtctcccaaagtgttgggattacaggcgtgagccaccgctcctggccttccttttttttgaagcaggttctcactctgttgcccaggttggagtgcaatggtgtgattatgtctcactgcaggtggtctaccttttcccaaggctcaggtgatctcctgcttcagcccactgagtagctgggattataggcgagttcaccatgcctggctaatttttgtgtttctagtagagacgggtttcaccatgttgtccaggctggttttgaactcctgggctcaagtgatccacccgtgtcggcctcccaaagtgccgggattacaggcatgagccaccgtgtccagcttttctgactctttttacttatcaggagactgaagcttggagaaattaagtgacttgcccaagttcacatggggttaaggcctgaatttgaatctacatctgctcaattaggaagtgagtggtcatagctagtctctacctggatggattgttgtttaattgttaaattttttcaaaataattttaaattattttattaaaaaagagggtatcattatgtttcccaggctggtcttgaactcctgggctcaagtgatcctcctgccttggcctcccaaaatgctgaggttacaagtgcaaactactgtgcctagccagattattacttaacaaccaaaacaaaggaggaaattgacggtggacaagtaagaagatcattgcaaaggttgggggcaggttgtttggggagtgtggaggaagctttttaaatgaggtacctgagttggattttgaaggatgaataggagtttgttaggacagaaagacattgcagagagaggatctagcaagaggtgactgaagaaaccatttatttgaccagcagttggggaatgccttgaaggcaggaaccacagcctttcagaatctccagtgcctgcaacagtgtctagaacattatctgacaacaagcttggtaaatacttctttaagtaaatgcctgagtaaggcacatttggggaacagggtgggagaaattgtaggagaagtagatgggacttgaatgtagaaggaaggcctcatggatcactgcaagggttggttatttttttttattttttatgttttgagatggagtctcgctttgtcgcccaggctggagtgcagtggcgcgatctcggctcactgcaagctctgcctcccgggtgcacgccattctcctgcctcagcctctccaagtagctgggactacaggcgcccgccaccacgcccggctaattttttgtatttttagtagagacggggtttcactgtggtctcgatctgctgacctcgtgatccacccacctcggcctcccaaagtgctgggattacaagcgtgagccaccgcgcccagccagggttggttcttaaaagccaatagggagccatgggaagttgtttcccagcagaagagagaaggccattagatctgccctatttattaatgcaaatatctaagtctatgaatcttcctctgagcaggaaaacgtgattgcttttaaatccatatggaaagaccctcagttttactcatgataaagagaaaaggaacttaaactacacagagatatttttcacttcagattggcagaggtcggaaacttgttatctgctgtgctttgtgaagtaattgcctttgtaccttatcagctggagtatgaattgatgttccctatttggagggcagtgtctgtctaaatgttactgtaggcaccctttgacctggcaggttccttttttgaaagtttatatatatgtgagacagagtctcattatgttgcccagggtggtttcaaactcctgggctcatgggatcctcccacctgggcctcccaaaatgctggagttacagatgggagccaccacacctggcagagaaagtgatcttatcaacactcttgcttgagtgtgaaattcaattgtttattcaatgctgcattgtttgtaagaggaacaccaatgccaagtccccaggagaccgatggaagtcaagttcatccctacaatagaatacaaagcagccgtaacaaagagtgaggaaactgttcatgtatactgcgggatgatctttaaatctgtgtaagaaggataccagtttcggtacaccagaagatctccccaattaaatgcccacaaaccctctggtcagagcagcctttcctcccaaccccgggtcaggttggcatcgttggcaggaccggggcagggaagtcctccctggccagtgggctgctgcggctccaggaggcagctgagggtgggatctggatcgacggggtccccattgcccacgtggggctgcacacactgcgctccaggatcagcatcatcccccaggtgaggctggtggagggggtgggcaaagatgggaggcatggtgggacccggctctgacccaccgcccctccccgccaggaccccatcctgttccctggctctctgcggatgaacctcgacctgctgcaggagcactcggacgaggctatctgggcagccctggagacggtgcagctcaaagccttggtggccagcctgcccggccagctgcagtacaagtgtgctgaccgaggcgaggacctgaggtatggtcgtcccaccatggctgggacctgcaggtgggagaggaggggatggccatgccctccccaagggccttcaggaaatgcctcccccgataggattatcactctgttacattaataaccacatgtctcttatctgcaattccaagctctgacacagtctctgaataccaaggttttcccccctaaattagcagttagtcttctatatttacttggtggcaaaacccaacctcaactgacacagggctactgatagcctttattgctcttgctcagtatttattttgctatgaaaatattgtttgatatcgggtggtaacctcaccactcactgggactataatataggatttttttttttggtaaatgtcaagtgtggactgggcacagtggctcatgcctgtaatcccagcacttcaggaggctgagagaggaggattgcttgagccccaggagttcgagactagtctgggcaacatagcaagaccctatctctgtggacaacagtattagccaggtatggtggcatgcacctgtagtcctagttacttgggaggctgaggtgggaagaacgcttgagccagggaggcgaaggttgcagtgagccgatattgcaccactgcactccatcctgggcttcgtctcaacaacaaaaagctgtgtggaaagatacacataaaatttactatctcaacctttttttttttttttctttttctttggagacagggtctggctctgtcattcaggctagagtgcagtggtgaggtcaaggctcgctgcaacctccacctcccaggctcaagcattcctcccacctcagcctcccgagtagctggggttacaggtgtgagccaccagggccaggtaatctttttattttttgtagagacagggtttcaccatgttgcccaggctacagtcgaacttgcgtaggcctcccaaagtgctgggattacaggtgtgagcagccacgccgggcccatctcacccatttttcagtgtatagtttctgtagtgttaggtacattcacactgttacacaacagaactacaactctgtacccatgaaaccctaactctccttgtcccctcccccagcgcccagccaccagcattctcctgtctctctgagtgtgactactctagacactgcatagacgcagaatcataggatctgtccttttgtgactggcttatttcacacagcatgatgtcttcaagggtcatccacatcgtagcatgtgtcagattctctacctttttaaggccgaataattttccactacatggatagaccacattttgcttatccgtttatctgccagtagatacccaggctgtttccacctcttggccgttttgaataatgccactatgaacataggtgtataggtatatgcctttagaaaaaccaaagtggctgggcgcggtggctcatgcctgtaatcctagcactatgggaggccgaggcgggtggatcacctgaggtcaggagttcaagaccagcctgaccaatatggtgaagccccgtctctactaaaaatacaaaaattagctgggtgtggcggcaggcgcctgtaatcccagttacgtgggaggctaagacactgagacaggagaatcgcttgaacccgggaggcagaggtttcagtgagccaagattgtgccactgcactccagcctgggtgacagagtaagactccgtctcaaaaaaaaacaaaaaaaaacctaaggtgttctggatttataaacccctctgaccctgagggtgtccgaagggcttgtggtaggcaataatttccagcactagagaggcagcgttgcttggtgggtaagagtatacacaggtgacagactgcctgggctcaaatccaggccccccaccccacacccccacccccgccccgccctgccacttactagctgtaggatcttaggcaacttatcttgtgtgcctcagtttcctcatctgtaaggtgggaataatagcacctacctaccttgcaaggattgaattatatgcacaaagttgttgaaacagtggcaggcatagagcaaagagtaaatactcattttagtcctgagtcacactcctgataacatcatttcacagagttggaattggaggcctggggcttgcctgacgtcacacagcttaaaagtagtgaggttgggacaagacccaggcactctaacgcctgcatgaccatagtaggttctgatcatgtaaaaggatgctgtttcatggaagggcttactgtgcaagacagccatgctggggccccaggggtcagttcccacctgggtcaggggctcactgggctcacaacctggaatctcaactcctccaccctccacgaagggtgctactccatgccaagggcttattctgtgacaagcctacacacttttttttttttttttttttttttgagacagagtcttgctctgtcgcccaggctggagtgcagtggcgcgatcttggctcacttgcaagctctgcctcccgggttcacaccattcttctgcctcagcctcctgagtacctgggactacaagcgccccgccaccacgcccggctaattttttgtatttttagtacatacagggtttcaccgtgttagccaggatggtctcgatctcctgatctcgtgatccgcccacctcagcctcccaaagtgctgggattacaggtgtgagccgccgtgccccgccacccacacacttttatgtgccatgtcgtcacgattcagcgaggacggatccattaggagcacagactctggggtcagaggacttgggttcaaattatggacccaccactagccttgagaccttggtcaagccactgagcttctctgtatctgtgtcctcttctctcaaaagaagagaacaataatatctaccttggtggacattatgaggattgagtgaatatatacaagcacttagaatgtgtttggcacaaggtggaaactagaaatagaactggacatagccataaacaggccaggcacggtggatcacgcctggaatcccacccaggtgttgtacacatctgtatttaaggcccacgtgacaccagccttgaatgtcttaggaagactgtagatttgattcttgaagcagcagtgagtcattgtaggtttgtttgcaacggcatgactgaagtgaaagctgtgctttcgctgttgggggaaatataaattagtacagtcactatggaaaatagtatgatgatttctcaaaaaacaaactagaaatagaactaccggggcgcagtggctcacgcctgtaatcccagcactttgggaggctgaggtaggtggatcacctgagagtttcaaacaagtcggaccaacatggtgaaaccccatctctactttaaaaatacaaaagccaggcatggtggcgcatgactgtaattccagctacttgggaggctgaggcaggaaaactgcttgaaccgggaggcagaagttgcagcgagctgagattgtgccattgcacgccagcctgggtggcagagcaagactccgtctcaaaaaaaaaaagaaaaacgaagaagaaaaaaagagccataaacagaaaaaagaaaatagccatttcacaggtggggaaactgaggcacaaagggtttgaatgacctgcctacagtcagcctgctcaaagatggcaggaacaggcttcctatcagttctgcagaccacagaccccagaccccatgtgtggggatgcctgaacacaggcacctcactcctgcactgcttcagggacctgtttctgggcacacccacacatcaccatgtgccgacaaacgcacgtcccagctaattgtcccaatcgttcccagcgtgggccagaaacagctcctgtgtctggcacgtgcccttctccggaagacccagatcctcatcctggacgaggctactgctgccgtggaccctggcacggagctgcagatgcaggccatgctcgggagctggtttgcacagtgcactgtgctgctcattgcccaccgcctgcgctccgtgatggactgtgcccggtaaggctcccgccccggcctgacctcacagcagccctgcagtggtgggggaaggaggcggaggcagtcctgggccactgggcttcgggttagagctggaggggtcctgaatggggccagagcgggaggaatgcccgggaacacatgccaagtgggaaagctgcccaaggacatgcgcccagcacacgcttccaacccagctgtgagggccagggagccgcatggaaagcaggacttctatggagaaaacctcagcgcaggcacactgggctctcacagctgccgagagcctgggctggtgtccaaagagcctctctgtctccctctcccccacagggttctggtcatggacaaggggcaggtggcagagagcggcagcccggcccagctgctggcccagaagggcctgttttacagactggcccaggagtcaggcctggtctgagccaggaccctcaaccgtaccccagttggaccagcccgcacagcctgcagtgctggagatggaagtgacccgtggtcatcgatagctccacacgatattgagtctagacctgtgtttgctctctgggaggaaaatggcagagaaagtggccaattatcacagagcatcagagccggaaggacctagcaatacacaggtctgcccgggcagggcccatctcgccctgtccaccctgcagccaatgtcaacagcgactctcagccccgctgtactctggactcacctgggggcctcaagcacatgcccaggctcccagctagacccttaaatcagaatctctgaggctgggaactgccatgctgtgtgtactttttacaaattaacacttttattttgggataatcccagactcacatgcagttaaagaaacaataatatagagagattcgtgtacttggtaccccatttcacccaatggtaacatcttgcaaaactctaggataaagcatcacagccagggtgttgacattgacacaacaatcttgctcgatttcccgttttacctgtactcctgtgtgtgtgtgtgtttattttgtcccatgcagttttatcacacatgtaggctcatgaatccacaccagggtgaggatacggaatagccaccaccattttccgaccacacccatcactctcgctcctgcccccagtgaccatgctctgttctccagttgtgtgtgtgtgtgtgtgtgtgtgtgtgtgtgtatttttttttttttttttttttgagacagagtctcactctgttgctcaggctggagtgcagtggctcaatctcagctcactgcaacctccacatcctgggttcaagcaattctcctgcctcagcctcccgtgcagctgagattacaggcgtgcgccaccatgcctggctaacttgtgtaatttttattagatacgaggtttcagcatattggccaggctggtcttgaactcctggcctcatgtgatccaccctcctcggcctcccaaagtgttgggataacaggcgtgagctaccgcacctggccgagtttggtgtataattttaaagctcccccataggattccaatgtgcggccaggactgagaactacagccctcgcatctcctgctgctcctcctcccccaccagagatgagctccaaggacacaaaaaccaggtgcccccccatgccaagcatgggtcctctccacgcatgagaaagtcaaatatgcaagtttggtttccaaaacaaacaacagaggagccaagacttcacagccctcaatgggagaatttgcccgaggacttggttcttttttttttttttttttttttgtccgagacaaagtctcactctgtcacccaagccggagtgcaggggtgcaatcttgactcactgcaacctccacctcccgggctcaagcgattctcccacctcagcctctggagcagctgggattacaggcgcccaccaccacgcccagctgatttttgtatttttagtagagacggggtttcaccatgttggccaggctggtctcaaactcctgacctcaggtgatccgctggccttagcttcccaaagtgctgggattacaggcgtgagatactgtggctggcgggttcatttcctatatgtggttgctaaaaaccaaattccagctccctgggggcgccccagcacccgtcggaacacctggagtgtttctgttcacagttccgctccagatgctgctgacagccaaaggctggacccggctgagcgtggagaacttgctgtaaccaagggtggtcaatgcacagcttgttgcattcctcacacatttctttttttgttttttgagacagagtcttactctgtcacctaggctaaagtgcagtggcaagatctcggctcactgcaacctctgcctcccaggttcaagcgattctcctgctacagcctgccgggtagctgggattataggcacccaccaccacacctggctaattatttttgtatttttactagagacggggtttcaccatgttggccaggttggtcttgaactcctgacctcaggtgatctgcccacctcggcctccaaaagtgctgggattacaggcgtgaaccatcatgcccagcctcctcactcctctttctgacagcggtcagtatattaatactggactcaccaaaccagctgcaggcaccggaaaagagggactaagtctaaagtagccaagcctaaggccacacatagatcgctgggaagggcagcgtgagacattagacaactccctagatcctaacattatgtatgctagtcagggagtctcactgacctcgtggcattgccgcaagaatgacataatacatggatatgtgttcgtggaagcacagaaggcaatcccccaggctttctgaaccttattgacacgtggggccagatagttctgtgctgtggggacatgtcctgcacatcgtaggacgttcagcagcgcccctggcctcttcttcactagatgccaataacatcctccttctaccgccaccagacttgtgacactgccattaatcccccagggggtcaaagccacctagttgggccgggtgcagtggctcatgcctgtaatcccagtgctttgggaggcggaggcaggtgaatcacttgaggtcaggagttcgagaccagcctggacaacaaggtgaacccctggctctaccagacatacaaaaattagccgggtgtggtagcaggtgcctataatcccagctactctgaaggctgaggcaggagaatcgcctgaacccaggcagagaaggttgcagtgagccaagatcacaccactgcactccaggctgggtgacagagcaagactgtctgaaaaaacacaaaacaaaaagacccacttggttgagaatccccggtctaacctgccccgctgccatccatcatccacagatacttgagcagtggctttgctggtgtcaggggtggcagggcaagaactccaccttttcttaaggacacagggcctgctccgcccatcaggtcatgggactttctgatggcccatcctcacaggttttgtgatgccccttttggcctggagtaaacttctaactgcagcttctaccaccttcaaagtggggcaggaagtccgcattcttgacctgcccctagtcatgcctgcaaagctgtggacccacaactacctattcctagctccatttcacaggtgaggaaactgaggctcaaggggttgacatgacttgccaagttgacccagtcagtaaggacagagtggggatctgtttctgggtgtaataccaaagtcattgcacagggcacatttgtcctttagagaaaggaagggcggcagatgcagcctgtcttctctggctggagctgagccacctgccttgcagagtgaccctaggcaggggctgccatgtgggcatttggcaaactcagctggggatgacccagggccaccagactctctttcctaggctgtgtgccagggagcagagggtgggccacaggcggccagcacgtgggaaccggcacctgccagcctgctaacgagactgctgttgggcccacaccacggcagtctggagacgcgccagaggggatgcccaggccattaatacccccgccatgggctgctgccagtagggtctggctggtgggtggaacacgaatttcatccatcaaggctgcagacttcctctctggtcagtgcctgcgcccagtagactctttaaaactcaacagtccacctcgccactgcaaacacgtaactacgtatacctgacactgctttaaatgcccgccacgcacgcattcagtggaccagaggaggaagccacctcactgggccccttactggaacgttttgatgaggaaggtactaccatcaggcccttttgacagatgagaaaacaaacagaatgagtggcatctctgcccaagcagtgtggcttcagagcccgtgtcctcaccatcagtcactcactctgtcacccaggctggagtgcagtggcgtgatcttggctcactgcaacctccacctcccagttcaagcaattcttatgcctcagtctcccaagtagctggaattacaggcactcgccaccacacctggctaatttttgtatttttagtagagacaggatttcaccatgttggccaggctggtctcgaactcctgacctcaggtgatctgcctgcctcggcctcccaaagtgctgggatgacaggcgtgagccaccgtgcccggccagtgcgtgttttcataaggtcactacagccaccaggttgaggacactgatgtgtgtgtggggggctgggggcaaaagcctcgagaccactgtggcagctgttgtagggatgcagggagaaagtggggtggctgggaccagcgtggtggcaatgggaggacggggagtggatagattctgggtgttttgcagaaaatcaaacaaatttgctgtaggacccgatggtgggtgtgaggacagatgaacagttcaacactggaaagcaccagccccctccttacgcctctctggtctggggggatcctttccaatgtggagagttctgcacagtgaggccagggccagcacgtagtaggtacaaaacagagcttccttccacagtacttccactcccctggatgaggagttatgcctcactctgcctcctcttcataaagtggattaaacttgaactcagccccggattccacctgagcatgcagctgccccaccccaagacactggcacagatgcacaccaggtggagctctctgggactgcttaggatctgacctgggattttaagactcagggtcaggctttgagatctaaacacatctcacatccctattaagattcccgctggtagatccaactactactcttttgaaatggagtctcggcttgctctgttgcccaggctggagtgcaatgacttgatttcagcccactgcaacctttatctcccacattcaagcaattctcctgtcagcctccccagtagctgggactacaggcatgtgccaccatgcccaactaatttttgtgtttttagtagagacggggtttcaccatgttgatcaggctggtcttgaactcctgacctcaggcaatccacccgcctcagcctcccaaagtcctgggattacaggcgtcagccactgcacccagcctcaactacttctaatttaacaaaaaaaaagttttatatagaaagagttccactatgttgcctaggctggttttgaactcttcagctcaagcagtcctcctgtctcagcctctcaaagtgctgggattacaggcatgagccacctcgtctagccaatactgctaattctaatagtcacaacgttaccagtttttcactgggcaccttcatactctgtggttcctaatgcaagccaatgacatcattcaggcatgagccaccatgcccggctggctgatactacctattctaatggttatgaccttactggcttttcactaggcaccttcacactctgcagtccctaatgcaagccaacagtttcaatggggcatgagtcactgcacccagacactactactcattctaatggtcaccacctcgccggctcttccctgagcacctttgtacaccacagtccctagtgcaagccaacaatttcaatcaggggacaggaaagcttgagggaacaatggcagtgctagaacgttctatctgcacatgtacttggtgcatggttttaggtgtggcagaaatggtgtgctccccaaatacagacattccttactgcccagactcacccagttcgaagttagaaaccgaacacactagtctgactactccgctatccaaaactccagaaccacatcagttaggaaagggagaaatccttctcttccacaggcaccgctccatttcccagctcccgcagtggttgggttggggccatgtgactcattttggccaatgggctgtgagtgggattaactgcgtcagttccggtttcagacacagaagagtgggtgagagtcgtccactctcccttctcccactgtggggacctggaggccaacccttgggaggccatgtcacaaaaccaggacagcctggatcacttgtcacagggaagtcacctaccctggagaggcagctgaccctcaccaagaactgcgtgagcaagaaataaagccttgcgatcatttccgaagattttacggcgaatttgttactgcagcgcagcctcgcctctctggactaacataaagggattttcaggccaggtgcctgaaccccagcactttgggaggctcaggcaggaggatccccagagcccaggagtttaagaacaacctgggtaacatagcaagaccctgactctataaaaatttttaaaaattagctgggcacatgcctgtagtcccagctacccaggaggctgaggcaggaagattgcgtaagcccaggagtttgaggctgcagtgagctatgatcgtgccactgcacaccagcctgggcaacagagtgagaccgtgcctctagcacaaaaaaaaaaaaaaaaaaaaaaaagggcagggggagggcaggattttcaaggatcgttctggccacatgtgatttctgcctcgcctgtgtcttagaacctgaccgaggctacgagtaccgcacacatcactgctcacagggtaagtacgatcagcctcattttacagacaaagcaagtgaggcacagaggctgagtgacttccccagggtcacaagaacagcaaatgacaagagcaggactcaagccagggtctgtccaaccccaaaacctgggctccgtccaccttgcggctgtcccgccttcccactaaaccccatctgactagtgatctctacaacttgccctttctggcaacagctcccactagaggcgacttgttgtcaaaaggaaagaacagaaacaggaagatgccacatcctgaccctgcagaggacatggctggaaccctcgaccgaaggccccaaaggaaagggaaccattctttagaaagaaataaaatatatgattatatatatttttttactgcaaatgttcgcatttccagtgtaagtcatatacaaaaggatcccaccaaaactatagattatctaatgtgaaagaatggtataacttacaaaaaataaatatatgcgttttcgcctaaaagaaagatgctctctgggtttgaagtcggcggcgtaattcttagcaagtctgagtcttggggcagcctcagctctggctgccttccggattccactttgggctctaacgagacaccttagagaacaggctttaaaagatgctgcttccctgttttcttccaggaacacagagaccaacacggtttcaaacacagggcgagcttctcactatttcctgggaatgttacttctcagcccaacacttctcttcccaagaagttcaagttttgagactgtttttctccccggaacagtacttaaaaaaaaaaaaatcattgatattcaaagatgggttcttttcgtgtcctggaagagcatcagtaactaaatatcaagttctccacaatgctgccccccctggggggctaaccggatgccaagggagagaattaacatctaaaaacaaggaaaagactcaaggggacatttttttggtacccactggtaatacttgggaggtatttcgtgttctttactttgaaagcttcataaccatgagcaggtaccatgagagggaaagaaaagaggtggtaagaaaaaagaacaaaatcaatcaacactgtaagcaaccaacactgctttgggccaggcccctaacacatttttctgctaggactggcatagtaccttccagctggttgctcactctcagtctctatttctagtcaaggtcaaattcccatgaggccatctccttaatatttaccccacatcaatcatggtgggaacagtaataacagcattgattgttcttacaatgttgaacaaaagaaaaaagggaaagcctggagtgggggtgggtggggagggaagccccaggtggaacgtcggccctgagacaatcccctggccctacagttccaggtccaggttagccgttagtccaaccaggtcccttccaggaggacaggcgtgggagtgcagaggctgcctctggcccaaaacgagaactggtagagctggcgctgagatgctggttcccagcttttgagtgcctggaagaccagatgttggtaagaggaccatccagggccctgggacactgccaaggggagaaaatgattttctccaggcccctcaaccacaaaactgcagccccaaggaaatgaagcgttcctggtagacccagacaaggatgttagaggtgatgggagccagaagcatctcaaagacttgcagtccacagacttcggctggagagatccgaggcagtaggctgaatttggtcactaggatcttctatacaaccaattcctccagaagtctggctgccaaaactcctccgtgggaagcaccaggaaaccacttgcattcctgggggcgtgaggctgtgtgtctgtctcagggcaccaggggcagggtgtgcgtgttttgggtggttcgcatctctgtctctcctgggtcttcacagccagttccaggcaggggaccggatggcggtggctgctgctttgaatatgttttggttgtctgggtttggtttttatgttttggtttcagtgtgggaggcttggtttaccaggggtactgactcctccctgggcgctggcatataggccctgcagttctgaccagatatgccagctctggggctcacaccaagccggcgtctttggccatgctgtagaaaagacctctctgctgcaggaggtccgatggggcgccgtactcctggatttctcctttgtccaagacgatcaccctgagggagaggggatacagacatgaggggaaggggaggggtgagcacctcgtgcccctgggacaactgacctgggcaagtcactgcttcgggtcaggcccctaacactttttgctaggactggtgcagtaccttccagctggttgctcaccctcaatccctatttctagtcaatgtcagattcccatgaggccagctccttaatatctaccccacatcaatcatggtgtgaatggtattaacagtgttgactgttcacattcactgttccattacattcagagtaaaataaaaagatcttaccacagtctacaataacgattggcaacatttttctgaaaaaggccagatagtaaatacttgaggctctgcaggccatatgctttctgttacaactacgcatctctgctgtatttatagtgtgaaagctgccagagacaacaggaaaatgaacagatgtggctgcgtgccaataaaactttattcataaaaacacgcagggggccagatctgtggcctgtgggccatagttggctgacccctaatattttaggtcctgtaagatttgacactgcccacttctgtcctcatttctatgtcctatatttcaaaagcaccaactcagcatctgccacttagtaggtggtactcagtgaactagaaacatcatgtcagctgggtgcagagactcacgcctataatcccagcactttggaaggctgaggcaggaggatcacttgaggccgcagtgagctgtgatcccaccactgcactccagcctgggcgacagggtgagaccctgtctcaaaaatatataaaataaaatagaaactcatgtcacttccctgcttaaaaccttccaatggctttatagggctcttagagtaagttccaagcttctcaccgtggttacatggtgctctaagatccagcccctgcctacctttctggcctaatctcctgcccctgtccactcaattccaacctctaggtacatggcctcctcatgctagccttcaaattcattaagcgcattcatttttacattcggctgtaccggctgcctagaatgttcttcctttagatccaaggttggcaaactgtggcctgcaggccaaatctgaccccttgcctgtttttatgaataaagttttattggaacatagccatgctcattcattcgtgcactatctatgatctgctttcacacggcaacactggagtcaagtggctgagaggccatgtggcccacaaagctgaaactaccccggcccttaagaacaaggttgcagatcgctgtcccagatcttctcaaggctgactccttttcattgttcaggtctcagctaaaatgtcacctcttcagagatgacccacacaaaactcaaaaccccccaggaccctggcactatggcagcattctgacttttgtggtccccggcactgatgcctacggaggtggctttctccacacaaaatgctagaaattctattttatgactgtgttagtataaataaaatccaggttggattatattctttttttttttttttttttttttttgagatggagtctcactctgttgcccaggctggactgcagtggcacaatctcagctcactgcaacctccacctcccaggttcaagcaattctccttcctcagcctcccaagtacctgggattatgggcacgcaccaccacacttggctactttttgtatttttaatggtgacagggtctcaccgtgttggccaagctggtctcaaactatcgacctcaggtgatctgcctgcctcggcctcccaaagtgctgggattacagccgtgagccaccgcacctggcctgcttctgattttttaaaaaaaataaaacctttttgtgggccccacgcactgggcctgcagtgttcaatggaaacagtggccctgcccagcactcgctatcccgtctccttggcaagcgtccttcccagcacctgctgccctctggaatcctgttggtttattgctctgtatattttttgtctcctccatctaataagctacttggtcctggaggcagggactttgtctgacagcagcctacagagtccccagtgtctgggaacaccgcaggtgcgctgacgtgaatgaatgactagatgatattagaaatacctggtaccactgggcacagcggttcatgcctgtaatcccagcaatttgggaggcggaggcgggcagatcgcctgaggtcaggagttcgagaccagcctggccaacatggcaaaaccctgtcactactaaaaatataaaagttagatgggcgtggtggcacattcctgtagttccagctattcgggagtctgaggcaggagaaatgcttgaaccccagaggcagaggttgcagtgagccgagatcacaccactgcactccagagatggagcgagactctgtctcaaaaaaaaaaaaaaaaaaagaaatagctggtaccatccaggatgaagagaggatccacccactggggctgtcactagggataaggacagtgttgaatgaattaatgaattaatgagtgagccagtgagtaaggcaaactcccaaagcctagaggccattgtgccagtggcatcaccttgtgtagtccatgatggtgttgagccggtgggcgatggtgaggacggtgcagtcctcgaactgtgtccggatggtggactggatgaggtcgtccgtttccaggtccacggctgccgtggcctcatccaacacaaggatcttcgtcttcctcagcagggcccgggctaggcacacaagctggcgctgcccgacacttgaccggaagaaaaaaaccaggagatagtgttgggtcaaaccacccctgaccctgaacctaggcccaggctgggagaagcgaaaggagacactctatgttgcttgaccaggaaagcatgtccactcccaacatctgtgtctgcagcagacatcactaatcaatcagagcacatctcctattcagcaagatgcaggttcagaatcattctcaaaacagcagctcacacctacaatctgagcactttgggaggctgaggtgggaggatagcttgaagccaggaatttgagaccagcctgggcaaaaaagcaagacccccatctctccaaaaacaaaaataaacaaattagctgggtgtggtggcatgctcttgtagtcccagttactgggaggctgaggcaggattgcttgagtccaggagttagagtccgagatcaatccactgtactccagcctaggcaacagagtgagacactgtctcttaaaaaaaaataaaataaaaaaaaaataagagccgggcacagtggctcacacctagtatcccagcaccttgtgaggctaaggcgggtggatcgcttgaggccaggagtttgagactagcctggacaatgtggtgataccccatctctactaaaaatgcaaaatttaactgggcatggtgacaggcacctgtcatcccagctacttaggaggcagagaggcagaggcagaacaattgcttgagcctgggggcggaggttgcagatgagattgcgccactgcactccagcctgggtgatagagtgagaccctccgtctcaaaaaaaaaaaaaaaaaaaaaaaaaaggcctcatacccatgcatcccttatccaactgtggggccatgagaggtggctctggaatcagacatgttccttgctttggccaatgggacaccagcaaaagtaaggacagccaaaagaatactgttagatgcaataggggcttgcacgctcttgtgcccctgccatcgccatgacaacatgcccaagctggtctgctggagaatgagggatgcacggaacatacccttcttgccccacctgaggccaaaagccagctgaccccgagatcagccaacagccagctgactcccagacatgcatgtgagcccagccgagatcagcagagccacctggctgactgccctcgtatggcagcaatgatcgttgctttatggttgaacatgcctgaggctttatggttggttgtcatggagacggataacagaaccagaaccaggcactaacaaacaccaccaaagcaggaccccagaggttccgctggtgtgccaggcattaatgctttagttgctgggtcatggacagagctccaggatcctggtagagaccaagacagctggggtagtgcatggggacctgggggctcagagcagtgctagtgaccaactggtacagaagactttccatagcttaacaactgacagccactatcaactgaatggagctggtgtgtataaaaggaaatgtactggtcatcctggttattctacctcatggtacaaagagcctggattgagacccgttttacagatacagaaactgaggctccaagaggtgaagggacaaatggtcatctgggactcaaatccaggtgacacagatctggacagaatcttcaaacacccctaccgagatggcgcctaggacaccttacccggtgtctccttgttcacccccgcctacctgaggttctccccgccttctgcacattcatggtctagcttgtcaggaagggctgacacgaagtccttcaggtgggccagctccagggacgtccagacttcttcatccgagtactggctgaatgggtccaggttcattcggagggaacccgaaaacaaaacagggtcctgttcagagagaagagagtggacggcatgtgacacctgtgtcacgctgacatggatggaggcgacctaaggacttctggccaggactgttgaaggtggggtatcagagctccttggaatcactatttctggagatgttaataatggagaaaaaggccaggtacggtggttcacgcctgtaatcccagcactttggcaggccgaggcgagtggatcacttaaggtcaggagttcgagaccagcctggccaacatggcaacaccctgtctctagtaaaaatacaaaaattagctgggcatggtggtgcatacctgtagtcccagctactcaggagactgaggcaggagaatcacttgaacccgggagacggaagttgcagtgagccaagattgtgccactgcactccagagcaagactctatctccaaaaaaaaaattgccttaataatggaaaaaaaaaaaagtctggaaagtctgagtttggcagaatacaacagatttcctttccatacaacttcctggagccttcaatatgcaagtgggttgagaacctccagaaatgagacgcagcacaggtgattcctaacagtaaagtcccatggattctcccgtcatccaaccacagaagagaatcttctaagacactttagggaagattacactaaaaggcaacatattaaggaatccacctgcggggattggtctagaaaatccttatttcagccaagcatgttggctcacccctgtaatcccagcactatgggaggccgaggcaggcagatcactcgaggtcaggagtttgagaccagcctgggtaacatggtgaaaccccgtttctactaaaaatacaaaaactagccacgcatggtggtgcgtgcctataatcccagctacttgggaagctgaggcagaagaatcgcttgaacccaggaggtgcaggttgcagtaagctgagatcgtgccactgcactgggtgacagagtgagactccgtctcagttaaaaaaagaaaaaaaagaaaagagaaagaaaaagaaaatccttatttctcaccaaatactgtgtgttctcacttgtaagagggagctaaactctgggtactcatggttgtaaagatggaaatgatagacactggagcctccataagtggggacagatggaggagggtaatggttgagaaactactctctctcgggtactctgttcaatagttgggtgatgagatccatagaagccgaagcatcagcatcacacaatatacccacgtaacaagcctgcaggtgcaccccgtgaatcgaaaattaaaaagtcttatttcttgtctagctcttggaagggttagagatgctcagtctgactctggcagcagagagagaagacggtgtctttttggatttttctagatgctctgaaactacccctcccggggacaggaagtcgggactgatagtcagttaattcccacgttgttaatcatatactaagaggaaattcagggaagcagcagcacagcctaacttcaataaaaacaatgaaggccagccacggtgcctcatgcctgtaatcccagcacttttggaggccaaggtgggtggattgcttgagcccaggagttcaagggcagcctgggcaacacagtggaaccccatctccacaaaaaagtacaaaacaaatttagctgggtgtggtggcatgtgcctgtagtcccagctactcaggaggctggggtgggagaatcgcttgagcctgggagacggaggttgcagtgagctgagattgcgccagcgcactccactctgggcaacagagcgagaccctgtttcaggaaaaaaaaaaaaaaaaaaaaaaagaacgatgaagtagggccaaatgtatgtttgccccaaaaatatacatacaccactgtcagtgcaatcatagggcttgccagctctggctcaccccctgggccacacccagaccccacctgggggatgatggtgatcttgaagcggaggtcgtgcaggccgatcttggcgatgttgatgccatcgatgatgatctctccttcggcagactcgttgatccgaaataagcccagggtcagggacgacttcccagctcccgtccgccccacgatgccgacctgcaggacagaagggcccaggtgtggtgggaatgctggcatccggacttgtccctgccccaaagtgccctcatctcggccccacctcaggcatcagtcatctggtcaacccaactcgacagccctctcccttgcgcgctgcccagagacactcctttaagggtgtttcggccgaaggtcaagaaggactctcttccctttgccaggctcccaaaaggaatgactcggctttttataagttactagagacctcaaaagagatatagaagaggcagaaggaatttccaacaaagccctatttgtttagactcaagaaactattaagtaataatcaggcatttcctcatttccccactgtttttcacacctttgatggtgagtttcccatcatgagttgttgaaatatctgaaagattcaggcagatcttccggccctttgctatgacctggtctccatgcatcctctcttgaaggaactaggttctctagctaatggccaaaggatgatgttcctgacctccagttctccccttcctgcctggctcttgagaagtgggctccttcttccctcctacaggggtgtcacagagcagcatgcgtgcaaaaattctcatgacatgagataagccataaagactcaacaagggctggggcacggtggctcatgcctgtagtcccagcactttgggaggccgaggaaggtggatcagagaaggtcaggagttcgagaccagcctggccaacatggtaaaaccccatctctactaaaactacaaaaattagctgggcgtggtggcatgcacctgtagtcccagatactcgggagacggaggcaggagaatcacttgaacccaggggacggaggttgcagtgagccgaaatagcaccactggactccagcctgggtgacagagtgagaggctgtctcaaaacaaaacaaaacaaaacaaaaacaaaaacaaaaacaaaaacaaaaaaagacagcaagaacatcacccactctgctcttctctgtaactcagagagaaattatctgctgggaacagaatgttctgagctctgtgggaggtacgtaggaacagttcaataagtccatatgttcagaggtgaaagcagccttgtcccccagcaaatggccaggaagactgtcagaccaattccagaggaaagtctaagggtatcactcaggtcaaggaacctcttccaagaacagctcggaaccaagagaaggttccaaaattctgacaatttctcacttcccttgagccatccccctagaagggatggtgacaccttattctagagatcacaaattctaatgttttggaggggccaactaggcaatgaatgggacagggagggactggggtgaaccaggaggctcacaggttgactagaaagagccaggcgggggaggattgacctgatgttgccagatgttctgatcttccaaaaaaagcagaaaataaatttttatattaagtcttccagatttttcagtatttgcaacttattcaaatttcttccaggccaggtgcagtggctcacacctgtaatcccagcacttggggaggctgaggcgggtggatcagttgaggtcaggagttcaagaccaccctggccaacatggcaaaaccccatctctactaataacacaaaaattagctaggcatggtggcgcatgcctgtagtcccagctactcgggaggctaaggcaggagaatcacttgaacccaggaggcagaagttgcagtgagctgagatcgggcccctgcactctggccttggcaacagagtaagactccatctcaaaaaaaaaaaaaaaaaaaaaaaaaaaacaaccaaccaaaaaacaaaaaaagaacttcttccaggggccaggaatggtggctgattcctgtaatcccagcactttgggaagctgaggcgggcagaccggttgagctcaagagttccagatcagcctggacaacatagtaggacccccatctctacaaaaaatacaaaaattagccaggtgcagtggcacacacctgcactcccaaccatgtgtagtccccccacttgggaggctgccgctgcagtgggctgagatcacaccactgcactctagcctgggtaacagagcaagaccctctctcaacaacaacaacaaaaaatcttccaaaacaaatctgtggggctcatttggtcttcaggctgtcagttcacctaaaagccttcacttctgcaagctgtatgcgctctgaacagcttttactgccacagtccactcccagccccccaaaaagccattcaagcaaaggtgtggagccgtgagtgactggggagacgctgcagctaggttcacctgcccgatggcaccctgtgcccgactgggaatgggtgagggaatggggcgatgtgtacccaccttttctcccccattgatcgtgacattgatgtgcctgagaacgaagtccaggtcctctcggtagcgcaggcagtagttccggaattccactcggcccacctggggccagctgctgggcggagctgtctcctggatttgccagggcgccttcgatcgcagtgaagggagagagtaaggaatttccagtccatctggtaaagctgtgactcccctgacctcccctctcactcactctgctgcccaaggtggcctcccaggcctcagcactggggggttgcccttcctggaatgttattccccaaatgacccccttgcatcctgtggatctctggtcgatacagagcaccctctcagccctgtgtccctctgtcccctcccgcactgccttctccttcagggcactgcctgtccccagccctcttggggctcgcatgcttgagtgtattctgtctcccacacccactgcaccatccactcaatgaggacaggctctaattgttcactgctgtatcccagggctcagagcacatagtaggtgttcaacacacatttatgaacataaacaagaagagtgacacagctgctgatatagaaagtgaactagtggtagaaggcacagaaactgagaggacatgatcatccctcagtaggtcagagataccttctgtaaagctgtcatctctgtgtaacagataatggctcaatggaccatagttgttcatttttgtctgccagaattaacgtgacgttcatgctcaccattcttttaaaataattgtacaactgatttgtatagacattgttcttttttttttgagacggagtctcactctgtcgcccaggctggagtgcaatggcatgatctcagctcactgcaacccctgcctcccaggttcaagcgactctcctgcctcagcctcctgagtagctgggattacagacacccgccaccacacccagctaatttttgtatttttagtagagatgtggtttcaccatgttggccaggctggtctctaactcctgacctcatgatccgcccacctctacctcccaaagtgctgggattacaggcgtgagccaccatgcccgccacagacattgttctcaatatgaacatgataggtaaacttttaaaaagtttttctgataaaatataaatgttgcccccagattcttttaacgtcaaggaaatgaataacagcttgtcagagacttcctacggaacaaagaattttttaggtaactatcattaggctggataaggtaatagatgtatttcaaaagagcaagtggaggtatatcttatccatatctttaggctgatgcaaaattttacggtttagacaacagtgtgccatgttatgcacagactggctctaggtatttgaggagcgcaatacagagagtttaaaaagtgattttgtaaaatctacactatggtctctgtttctccaaagtaaatgtgatttgttcctcacactgcagtgagtaaaaaagaaacaagaaaacaataacataaatattgaagtatgtttcagtgttgggtgaattttgtttttagatgccaataaaacttactttttgataaaaaaaaatttaaataaatatttataaatggagtcaatgaaatgagtggtcttctctggacagacacgacaataaaagtgagttaccctggctgcccaccccggcaggaaggcaaggataaaagcagcatctgtatcgcagtgtctcatccaatcctcacagcaaccccatgtgggagggtcctttcattatccccagtttacacacaaggagactgagacacagagaggggcggtaacttgcccagggacacacaaccctccttttgaaaagtagttcagttcagcatttcctgaggcccacagctggatatggcctgggccaggttcactggttttagcctcggggaatgcacctccccgtccagggcacacacaggtgctgaaccaggctgcagagcacatggccaagctcaggggcactgcagacggcacataacaagaaaacgccgggcaacttttaggcaagacatgcagcccttttgtggacgtgctataaaatcacagcgttgccggcgcagtggctcacacctgtaatcccagcacttagggaggccgaggtgggcagaacacttgaggtcaggagtttgagaccagcctgaccaacatggtgaaacctggctctactaaaaatacaaaaattagctgggcctgatggtgggagcctgtaatctcagctacttgggaggttgagacacgacgatcactagaatctgggaggcagaggttgcagtgagccaagataaaaccactacactccagtctgggtgacacagcaagactcctctgtctcaaaaaaaaaaaaacaaaaaaaaaccccaccaccaccgccaacaacaaaaagtattattttttgttttgtagagacgatgtctcaccatgttgcccaggatcgtctcaaactcctgggctcaagtgatccatctgccttggcctcccaaagtgctgggattacaggcgtgagccaccgcgcctggccaaaaaataaatgttattattgagcgcttacaatgcaactaaggcaagttgctctgctcagcacttgagacccatgatctcatctgagcctcacagcagcccttagaggcagtgactgttactatacacagatgcaaaggtgcctcatggttaaagaaaaggtttcacaggataacaggtagattccacttacgttaaaagaaaaagaaacaagcaaacaaaagtgttggggtatgtgggaatccacacgggaaagttttgggggaaattcacccgaatgctaatggggcctctctctggagaggagaggaacggggcgaacaggaacaaactgtctttctccaccataaacttgtttttttgtttttcgagacagagtctcactctgtcacccaggctggagtgcagtgatgtttcttcagctcactgcaacctccacctcccgggttccagcgatcctcccacctcagcctcccaagtagctggaattataggcacctgccaccatgccaactaatttttgtatttttagtagagacgggattcaccgttggccaggctggtctcgaactcctggcttcaagtgatccacccaccttggcctctcaaagtgctgggattgcaggcgtgggccactgtgtccagccctgtattgattttttcttttttaaaacaacaagtgtatctctattttataatttatgtacataattgaaggggagatgctataacaacacagtgagcggaatggagagaagtatgtggaactttctatctatatataaaaatacatgcaaatacagaatagtggtaggactaatgaggacaattactttctcttgggtttgtcaaacacgatccttctaaaaatataaaagtcagtcaaaagtaaaatgcttttaaaaactgaactcaggccgggtgtggtggctcacacctgtgatcccagcactttgggaggctgaggcgggtggatcacgaggtcaggagttcgagaccagccgggccaacatggtgaaatcccttctctactaaaaatacaaaaatcgcctgtaatcccagctactcaggaggctgggaatcgcttgaacccaggagaaggaggttgcagtgagctgagatcatgccactgcactccaggctggagcgagacttaagtctcaaacaaacaaaaaaaaactgaattcaatctaactgaacgctttaactgggtgaattccatggcatgtgaaattcacatgtcaatgaggctattataaaaactaatgaaataagttagctgggcggggtggtgggtacttgtaatcccagctaattgggaggctgaggcaggagaatcacttgaacccaggaggtggaggttgcagtgagctgagatcgtgccactgcattccagcctgggcaaaaaaaaagccaaattccatctaaaaaaaaaaaaaaaaaaaacctaatgaaataccttgtaagtgaattaaattcagtgtcaagttggaagccgccggtgtaatacacccttggttcctcacgggggcactcacgccattcttacaatgctcacccgtgacatgggacctggttcacccagtcagaatgttaaaggagtgggccgaggtcacctctgtgaattcctcaggaggacagaccttacagaggccttggtctcactcccaaggggcatctctcctcaggaggccgggtagcatgactcccatggcactggatagggtctctgaggaggcacaggctcaacgcctaggtctgccatttaccagccatgtgatcttgggcaagtaacttcagctttttgtctcagtttcctcacctgtaaaatgggggtaatagtagcatctaaattatagggctgggctgggcatggtggctcccgcttgtaatcccagcactttgggaggccaaggcaggcagatcactagagctcaggagatcaagatgagtctgggcaaaatcccgtctctactaaaaatacaaaaatcagtccggtgtgatggcatatgcccgtggtcccagacactcaggaggcagaggtaggagaatcacctgagcctgggaggcagcgaatgagatcgcactacactccaacccgggcaagagtgagaccgtgtctcaaaaatcagtcatagagcggggtaaagactgagtgcattactctatattaaacgtttaagtctgggcctgacattctacaaggcactatgtgtgtccctgttatcattaatgtagggtgggggtgtcgccaggcattattgtgattatctattatcactgctgttcctacttgtgctgctgttcagggcctaagaaggcagttattaagggcaacgcaacatcaaagactggaggcacaggtcctagtcccagctgttctaccaagccacgtgggaccttggatcagctgttgtccctccccaggttccctttttctccatctataaaaaggggactggggttcaataactgcagggtttcccaaactttggtcagttcccagctacatcattcgtgtagtatgcatgtactcattctcttgttgttttaatatgcttaatcaagtcacttagacttaatttctcaacttacttaagaggaaaatttattacaatcacaaaaggaaaagtagtattattttccgtaacaggagtcccctatacaaatacataacaggccaggcgcagtggctcacgcctgtaatcccagcactttgggaggctgaggcaggcggatcacctgaggtcaagagtttgagaccagactggccaacttagtgaaacccccatctctactaaaaatacaaaaattagccaggcatgatgacaggcacctgtaatcccaactatttgggaggctgaggcaggagaattacttgaacctgggaggaggaggttgcagtgagccgagattgtgccactgcactccagcctgggtgacagtgagactccatcacacacacaaaaaaaccaaattcataacaaataacagaaggttatttctgatagacagaagccgtcctgttgaagactccaagtgtgagggctgctgtttatctgtctgttgaagggagatcatctcaattgctaaagtgttaaagacctgctagccccagactaagactttctctgtgataccatcagaagttatgaaagagaaatagagggggaaacttcttcacaatgtgaataccttctgaatgccctgacagcatcccacagtctcgtatatggataccccagatcttgggtaaagccggtaaactattttcaccctaaaaccgggctctaaataagtgctgcaaaaagactggacaagcgttaagatgcacttctacctggtgaggtatccagctcagaggcagaggtgcacaggatagggtccagagatctccttggggtaaagctacaccaaagaccaagaggtccagccaggggcccttgcctacctccttctcagtctctgaatactccttgagcctctccacggccacgatgttggtttccatttcagatgacatccgaaccagccagttcaagtacgtggtgacctgtgagtggaagagtcacgtggcatttccagctcggtaccctttctttttctttttttttttttttccactgagataataggaaacaaattattttcaacaagtatgaattatgggaggctgaggcggtcagatcacctgaggtcaggggtttgagaccagcctggccgatgtggcgaaaccccatcagtcactactaaaaatataaaaattagccaggcatggtgacgcacacctgtaaacccagctatttgggaggctgaggcagaagaatcacttgaacccaggaggcagaggttgcagtgagccgagatcccaccactgcattccagcctgggtgacagagtgagattccgtctccaaaaaaaataaataaataaaaataaaaggttatgagttatgaaacattcaggtaagaaaggtaccgaaattagcaaccccaggtatagccatcacccaggcctgccacattgccatctcctaagcacacacatttccaaaataactcatgggccacataataagaaactggaaaatatttttagccaggtgacaatatgaaaacacaatgtatcatcatttgtgagatgcagctaaagcagttcttagagggaaattcatagctttaaaagcattcccctcgtacctggaagtatcctcttgggccactaaggaatctgtgtgactgatggggaaaatcctggccacatgtcaaatccgtctcctgctctagttggtcaccaggcactgtggcactgtacctgctcctcaaactccgtacctctcaagttcctctcccccattcctgttggagctggaatccaaagccaaggacaactggctcccccattaacagactttaataatccagccaagagcatcccctcttacctgcaatgagtaagacactgagaggcccaccaagccagcactgaggctgtgcctggagatcaccgcaaacagggcagcaaacagaacgatgcagttgcccacacactccagccgcacggccagccacctgcgccaagacacacaggcagacaaacaggcatggagtcagctctacagagacttggcttacagctcttgggggaggaaggggattctttgctaactcaagtaactccgcagtaattccagagagagtccttcctggcactgctttttcaaaacatgcacaatgggcgcagggtagggagggccgaaggcacgaggccagtaaatcctcattaatctggcaaacccatggattaaaacagagctctccagaggcaatcttccctggaatctgaagcttgcctttttaagaaccaacttttttctcattgaagcctttaaaatacatacacataggccgggcgtagtgggtcactcctataatcacacacacacacatacacacacacccacacacacacacacacacacacacacagccgggcgtagtgggtcactcctataatcacacacacacatacacacacacacacacacacacacacacagtgcattaacaacaacaaaaagatgtcctggaaattcctaaatactaagaagacatcaactgtaagagacactagggatttaaaataaccatcgtttctcggccttttggctaaaaacaagtagaaaataacagtctcttgttacgagacagatctgggaggggagtgcgtaactagtacgagtaaacatcattgtaacgttcccaagcccagactcttcatttcaaagtgttaaaatatactattttaccctttaaaatagaaacagaaatcatgttttctgtcattttgtttttttgagatggggtcttactctgccatccaggctggagtgtggatgacatgatcacagctcactgccgcctcaaccttccaagttccagtgatcctcctgcctcagcctgagtagctgcgactacaggcccatgccaccacacctggcaaatttttggttttttgttttgtttttagagacagggtctccctagagtgcccaggctggtctcgaactgctgggctcaagtgacccgcctgccttggccacccaaagtgctgagattacaggtgtcaaccaatgtgcctggtcatcttatttgtttaaagctaggtttagtatggtatcatgtaccatcagaactattttattttactttttattttattcttctcttctcttctattatttcttcagatagagtttcgctctcgttgcccaggctggagtgcaatggtgcggtcttggctcactgcaacctctgcctcttgggttcaagtgattctcctgcctcagcctcccaagtacaggcacccaccatcatgcccggctaatttttttgtatttttaatatagatgggattttgccatgttgaccaggctggtcttgaactcctgacctcaggtgatccacccactttggcatcccaaagtgctgggattacagatgtgagccaccgcgcctggccatcttatttgtttaaagctaggcttcgtatgatatcatatagcactagaactattattttaatgttctaaaatataaagcattctaggaagatggggtgttgatcttttctccattgcagcccttatgaaccaagtgactgatcctcactactccgacagacacagccagattgtgacaaactccctaaaaattctgaagggaagtcaaggtctgtaatcattcagggttagcccacccagacttacgctatgggattagagtgtgtaagacgggctaatggttatgggacacctctggggtgctgtcactttttcagaaaagtctataaggatgcaaatgggtgagagggacacttctctaaattcagcaaataattagcaaacttctgcctcttttggattgatgctattatctgtgatccacaagatgtcaatctcccacccccatctcctttttttgtttttccagagacagggtctcactctgtcacccaggctggagtgcagtggtgtaatcatagctcaatgcaactttgaactcctgggctgaaacgatcctccagcctcagcctctcgagaagctaggactacaggcacacaccaccatgatgggctactttttttttttttttttttttttaagagagatgggggtcttgctatgttgcccaggctggcctggaatctaatggatcctcctgcctcagcctcccaaagtactgggattacaggcgtgagccatgacatctggcccacaagatgacaatctcatatggtttagcttagtattagtaaattgcttctgacacacatcacccaggggtgcatgatcacccccagacgggaacagcggtatgaagatactcaatagcagagtcggtcgctggcagtcttgcatcactaggatgacagttaacgggaagcacttgcagggctttctgactccagaagagctgtgtccctgcacttaaatgccgcgggcactgcatgtctacagtgccgctgtctgctcttaatgattcatctgtcctccgcgctcatcaagcctctccatcctttctgcaaggccggggtttggctttatacccagctcaaggtgcgaggaaaagatcgaggcaaagagacaaggtgctaaggcggcctcctccacccgctcctgcaggcccaccatgcccacctgttggccacgatgctggggtaataggccttctggttctcgtccaccttcaggtcactctggtggatgaagcgctcctgctcctcgaaggctcgaatgacgctgacccccagcaaggtctcgttgaaatgggaatagaccggggagcggctgaccgactcgaggcgcttcagctgccgggaggaagccacgtagaacctctggggtagagaacagacgcggggagttgatgaaggttccctcctgccatcctcccagggcagggctgtgctggagaacatctagacgtaaccgatacctccaggaggcaaaatgttagagccgggctgccctcacaggggtgcccactcacctggtgaaccacaggaatagcaccaccaatgacaaggacagtgacaataatagctcacgcttatacaaagcccacagccccaggcatcgttctaagcagttttacaaacatcagttcattcaatcctcacaaaaaacctgaggtgctcattcctatatgtgatgggtagactaaggcacaaagaagctagttaatctcctccccaaggtcacatggctagcaaggggcagaactgggattcaaacccaggccatctgggctgcaaagtgctaacctctaccctgtactgcctctctgaagcctttcacctctagggttttctggaaccagcagtgtggttttcagcataggctttgaggtcaacgagacctcagttcaaatcctgactcaactactgactggcaatataaacacgactaacactttacttctctaagcctcagtttccttatctgtaaaatgggaacaacaaggcttgctcggccaggtggggtggctcatgcttgtaatacccgcacttcaggaggcagaggcgggagatcacttgaggccaggagtctgagaccagcccaggcacatggcaaaatgccatctctacaaaaataaaatattattaagaaaacaaacgaaacaaaacaaagcttgcttcacggggtcattgtgagggtgacatgtaagagttacagtcttacatgtgatgtgtatttgcgtggacacattatttcataaatcatatagatatgcatgatgtcactaagcacagtgcctggtaatactaggttgaaccacaggaaatagctgtttctgtagataagaaataagtattagcagtttcatatagtttgacctaacagtaagcattcagttagctggtgactattgttatcattaagtgacagaattccgcctgttgatcacatcccctcaggagtgactgtgtccatgcaatggccggttccagcacactcagcccagctgagatgcccatgaggatagggtcaatctcgtcacccccctccgatggcctcccagcgctgttagagttgccaaccatgcttcttccctcaactcatctcatcctgtaactctccccttccttccctgcacacaggccgcctgcctccacccaccatgcccatcccgtccaggccattcctcatcacccagcagatgggagcacagatgtcacttcctcgggaagcccttcccatcctccatgagcaccttctccgggcttcagtgtcccagctcccgggctacgatgatacgtttcacaagcagctccacccaccctcgcgggcagatgcttcatctgctctgcctcccccaacctgggcattcagccagtgccaggcaccaagagcctcccgataagtcttgttagattcagaacaaaagccaaccaccttctgcaagctttgtggagctgtggatcagaggctgcaccagccatgtgaggacactgcgctctcctagcctaggtttttctcatctacgcaaaaggaactggtgagcccggggttcctgattccacaaggtgcctacaattgcttatcgacaggagagctgggaaaactaacaaagggttgctaggaactcggcctccctgcatcctgccctgggccaggtgtactgggctgctttggggcagagtccaacaaaaagcatcaatagcagcaggtggcttttacaaggcctctgtggttggcagcttctttctgggtggcggcacgggcgttaattgcaacccacagatggagagtcttctggggccccagaagctatgtaagtgaacccaggtaccgcacaaccccacgcagtctcagaatagctgttctgccaattcctggaatgtggatcagatataatttcttctccagctgttcccaccgcctcccatgaaatccagacccctctgcatggctgaaggcccaggtgatctgccccatcttaccctggaccacatctccttcctctcttaccagcttgctttctgaacaatccagatgcaaatcgctctcaagtgtgttacctgttcactttcctccacttgccactgcctctgaaccttacttactggaaaaatctaacctgagatgaatatttgttcaggaatgatcttattttattttttaagacagtctcgctctgtcaccctggctggagtgcagtggcacaatcttggctcattgcaacctctgcctcccaggttcaagcaattctcctgccttagcctcctaagtagctggaattgcaggcgcccaccaccgtgcctggctaatttttctatttttagtagagatggggtttcaccatgttggccaggctggtctcaaactcctgacctcaggtgatccacctgccctgctgatctgatgtttttttcagacaactcgccctgtcaccaaggctgaagtgcactggcacaatgtcagctcactgcaacctccgcctccgaggctcaagtgacccttccatctcagcctcccaagcaggtgggactacaggttcacgccaccacacccagctaatttttgtattttctgtagagaccaggttttcccatgttgctcaggctggtctcgaactcctgggcccaagcaatcctcctgtctaggcctcccaaagggctgggattaaaggcatgagccactgcacccgaccgaacttcatataaatgaaatctcacagtacctactctttttcgtctggcttcttttgatcactataacatctctgagataaacccaaattgttgtgtattagcatttcattcctttttactactcaaccataaattgtataattatatcacaatttatttctccacggtcctgttaatggacatttgagctgtttccagtttgggcgattatgaatcaagatgctgagaacattctaagcactgcctttgctcttttttttttttttttttttttaatatacacttaggaatgagactgcctagtgagaggataaatgtaaatttagccaaaagccattaaaaaattaactattctataatctcaacccttaaaaagacgatgttttcatgtatctgcctcccttccagtcctgcccacacacattatgcatttcatctcggtgataacgacagtgcacctagaacttggtcctttgctaaaatcatttcctttgttgttgaaaaataaaaatccttggtgctccaacagctgcgtcttctaattatccctgctcaaagccacattgctccacggtgtacccaaggtcctgctattggcagacatttaagttgccttcaacactgcatttggcctgttttgttctttttgggtctttcaggaaattttccagcttgcgtatgaacacagataacatatttggtaaatgcagggaaaaaaaaaaaaaaaaaaaaagctggcaccaatttcaagaggatataacgagactccaggaactggacctactctctctgattccatcactgttcgttctcatcaatcattgggccacagtgtggtggggcgcaggggccacatgattgaaccaaggccccctggatgccacctgaacagctgtgcagcgtggtttgagatatggtgagcctcatggtttcttactcttgttttgctttgcagctggaatgctcccatctaaacaacccatccctactggcaattgtgctgcggttaatcctttagcggtaacagcagttttggaattggacagacttgaggttgcactctcagctctcccacttagcaagatgctccacctgtcaattgaaaacattatctatcctgcgatatcctaagaaaccacatgtgttcaaagaacaaagaacatataaccgtttctgcagaagggatgcagcagagacgactgactgcctacacaatttctcctttcccaacagaaacttctctgtttttttttagacagagtatcactctgttgcccaggctggactgcagtgatgcaatcttggctcactgcaacctccacctcccaggttcaagcaattctcctgtctcagccttcagagcagctgggactataggcacatgccaccacacctggctaatttttgtatttttagtagaggtggggtttcaccatattggtcaggctgctctcgaactcctgacttcaggtgatacacgcgcctcggcctcccaaaggggtagggttacaggcgtgagccaccgtgcctaggcccaactgaaagtttttgctgggaagtgcaatgtgcccagctaaaacacggcactttccagggtcccttgtgaatagaggtggtcccatgactaagttctggacaattagatgtacaggtgtccctctaatccaaggttgcactttccgtggttatatggtttggctgtgtccccacccaaatttcatcttgaattgtagttcccttaatccccatgtgtcatgggagggaccaggtggagataactgaatcgtgggggcagtttcccccaaccctcatgatagtgagttagttctcacaagatctgatggttttataagggggctccccgacttcgtggtgctctcattcttcttcctactgccatgtgaagaaggacatgtttgcttctccttctgccatggcctcctcagccatgcggaactgtgagtcaattaaacctctttccttaataaattacccagtattgggtatttcttcatagcagtatgaggacaaactaacacacatggtttcggttatccatggtcaactgtggtccaaaaataatgtgtaagttttaaattgtgcacccttctgagtagtgtgatgaaatcccccccagtcccatccgcggtgtgaatcatccctttgtccagcaggtccatgctgcagaccctccctgtcagtttagtcacttaatagccatatcggttatcagactgacggccattgtactgcagtgcttatgggtaagtaatccgaatttactcaataatgcccctggctgggctcagtgggtcaatgcctgtaatcccagcactttggcaggctgaggcgggcggatcacttgacgtcaggagtttgagactagcctggccaacatggtgaaacctcgtctctactaaaaatacaaaaactagctgggtgtggcgcatgcctgtaatcccagctacttgggaggctgaggcaagagaatcacttgaacccgggaggcagatgttgcagtgagccgagattccatcactgcactccagcctgaaggacacagctaaactctgtctcaaaaaaaaaagtaataaaaataacgcctctaatgtggagaagtagtgatactggcatattgttataattgttctattttattattataaattactgctattaatctattatgccaaatttataaattaaactttatcataggtatgtatgtacagaaaaaaacaggatatgtaggattcaatactatctgcagtttaaggcatccattgggggagtcttagaatgtgtgcctgcagataagggagtagtgctgattcagcacccatatgctcccttgccctacttcccttccttgatctcactgactgaaatatagatataatggctggagctccagcagccaccttggaccatgaggccaacttaagaatgaaaggggccgggcgcagtggctcacgcctgtaatcccagcactttgggaggctgaggcaggcgaatcacgaggtcaggagattgagaccatcctggctaacatggtgaaaccttgtctctactgaaaatacaaaaaaaattagccgggcgtagtggcgggcgcctgtagtcccagctactcgggaggctgaggcaggagaatggtgtgaacccgagaggtggagcttgcagtgagccgagatcgcgccactgcactccagcctgggcgacagagcgagactccatgtcaaattaaaaaaaaaaaagaaagaaagaaagaatgaaaggcttgtataaatatggtaagattttttaaatttttaaataaaagcaggtatctgggatattaaactcatgaagctgccataccagccctgaacagcctacctctaaatttctattatgacagagaaaaagaaaacgtctatcttatttaggctgctattagtcatgttttttgtttagttcctgcctcctgcaggaggcttaagaactaaagaattttatacttgaagaaattttaggctggacgcagtggctcacatctgtaatcccaacacttggggaggtcgaggtgggtggatcacctgagctcaggagtttgagaccagcctggccaacactggtgaaaccctgtctctactaaaaatacaaaaattagccggccgtggtggtgcgcacctgttaactcaggaggctgaggcaggggaatcacttgaactgggaggtggaggttgcagtaagccaagattgtgccactgcactccagcctgggtgacagagcgagactctgtctcaagaaaaaaaaagaaattttaataatgaagttgtctttatagtgataggttttgtttcctttttgaattgacaggtggaaaagtaaaacttaggaaaaaactgcattccacaaaaaaagtgcattttgttattgtgagcaaaaaaacaatttaggtattcgaaactgacaaaaacaaatctacatgcttcaaaagcaccacactggggacatggtaagataaaacaaggctttaggtaacactggtatataatgcacagtagggcttgtcccgaacactaagacctcaccccttacctggacgaagaagtagatgaggccaaggggcgggatgatgatggcggcgatgggcgtggccagcaggataacgatgcaggcaccaatgacgttgaacagggagcccatgaacatcttgatgacctccgggatcatggagtccactgtgtccagctccttggagaagcggttcaccaggttcccactgggggtccgctcaaagaagctcatgggtgaccgcaggatgctgtgcagcaggtccacgtgcagacagcgggaagccaagatccccccgatggacacggccatggagtagccaaacacggcgatccctgcagacactcggagttaaaactccacaatgcagagagggagctgaccaggcactgcagggaggagtggccatgtggacgaggcaggcctggactcccaacttctaataataataataatgatgaaccaggcatggtggctcacacctgtaatcccagcactttgggaggccgaggtgggtggatcacttgaggtcaggagatcgagaccagcctggccaacacagtgaaactccgtctctcctaaaaatacaaaaattagccaggcgtggtggttggcgcctgtaatcccagctactcgggaggctgaggcaagggaattgcttgaatccgggaggtggaggttgcagtgagccaagactgcgtccactccactccaacatgggcgacagaatgagactccgtctcaaaaaaaaaaaaatagtaataataatgatgatgataatggcagctattattcagagggtacttcctatgtgctaagcactgtgctgggttttacatgtaactgatttttatgatgactctgaataacttctattactacccaacttacagataagaaaactgaagtccagataggtgaacgcctttgcccttagtatactgtgcctagcagaagcagaactgggattttaatccagacagcctgctcttaatccccatgccatattcttctagaccaggggtccccaaccccggggccacagattggcagcagctcatgaccggttaggaaccaggccccacagcaggaggtgagtggtggtcacctcctgagcatcagcgcctgagctctgcctcctgtgagctcagtggtggcattagatcctcctagcagtgcgaaccctattgtgaaccgtgcatgcaagggacctagactgtgcgcttcttctgataatctaactaatgcctgatgatctaaggtggaacagtttcatcccgaaatcaccacccaccatttccatgaaaccagtccctggtgccaaaaaggctagggatcgctgttttagaacagtgctgagataattttctgaaatgatggctactgagcacttgaaacgtgtctagtctaatcgaataaatctttaattttatttttcttttgagatggggtctctctcatcctgtcacccaggatggagtacagggctgtgatcacggctcactgcagcctcgacctcctgggctcaagcaatcctcccacctcagcctcctgagtagcagggattacagacatgcgccaccacgcccagcgaatttttgtattttttgtagaaacagggttttgccatgctgcccaggctggtcttgaacccctggattaagcgatccacccgccttggcctctcaaagtgttggggttacaggcgtgagctactgcgcccaacgtttatttaattttaacagctgaaattaaaatagccacctgtgtcttgtgactaccgcaccagacagcacagctctggaacagacgttgttgctgtgtgagttcaggtaataccacaccctctctgttctctaccttccctcaattataatttgtaggccacagtcctttcccctaatggcaaggagaggggaggggagggattgagagactcaaggagtccatgtgtgctctgctaccgctgggttttcccaaagccacctcctggagatcctgagacactggtgcttctctcaaacaatccacaggagcgcactgtgtgttccagagcagcaacttcctaggaacagagaggcttccatctcggcctctttaatcgggaagacacccaataggcaggggctcaagtaacaggctctggagccaatgctgccaaatcccatctctgccacttaccagctatgggacctcctactggtcactgaatctctcagtttcctcatctgtaaaatgggacaatgacgctgacctcggagcactgtggaatgtgaagtccccacctggcaatgtgcctggcatacagaagtactcaaatgtgtcaagactatccatttactgtgtatatatcatatggaccatacatgtgtatttgcaaacatggctcacatactgcgtagcacagtggataacagcgtgagctcctgagccagactgccttgttcaatgccaatgctgccatgtattagctgtgtgacttttggcaactgactcaacctctctgggcctcaatttctgtatctccaaaatgagggaaatattaactcctacctcacaggactgctgcaaggataaaataagttaaaacacgtggaagtgtttagaacaaatccaagcaccaagtaaatgctcagtaaatgccagctgttaatatcaacgctgctgcatttgaggactcccataggaccacacagaacagtatagagcagggttttttttttttttgtttattttttgagacagggtcttgctctgtcacccaggctggagggcagtggtgcaatcacaggtctaactgtaggctcaaactcctgggctcaagcaatcttgtgacctcagctgcccaagtagctgagaccacaagcgcataccaccacgtgacctgtagtttattttatttatctattttttctaaaaatagggtctcactatgttgcccaggctggtctcgaatatctggcctcaagcaatcctttgacttcagcctcccaaagtgtgggattacaggtgtgagccaccatgcctggccaacagcagggtttctcaatcttttgacaaccaaaagcatctccagatattgtcaaacatccccgagggacaacactgcccataattgggaattactagtataagccaatttccgccctcactcagcaggcaaaagtccgcaaatgagacctcatggaagctctgtcactgtgacaaagcaaacatgctcaagggggtcctcccaaccctcagtgcttccagaggcctctgttctcaactgtcctcatctgtaaaatgggcacactggagcactcctcccgtctaccaccaaggcccatatgaacaaagcactcaaacacccactctacaaatatctgagtgtctactagctgacagctaccatttttctgggtttggcttggtttggggtcccacaaaacgctgaggactctaaggatccatttctataattagacaaagccacaacaggggcccaaatcaggcggggtgggagacagtggcaccaaccttgtgaaatgcccagggctccatagacgctcagccggactttcgtgtgctcctgagtcccgttgacgatggggtcatcagtccagaggctgagccaatagttggaagccagcgcggacacatggttacacatgaaaaggaagatgctgaggaaggagatgaagagtccgatggccttcatgtagtcccagtacacggaaagcttgacctggagatcacaggagataaggcagcttagcacatgcacgcacccagccccagccccagccccacaaggtcgggggcttcaccagcactgtgccacccagctgcctgcctttgctcctacgtagaacacccctcccctttagctattcaacaaagtcagcagtaaacaaagtcgagggccaggcgccgtggctcacacctgtaatcccaacattttgggaggctgaggcgggcagatcaactgaggtagagacttcgagaccagcctggccaatatggcaaaatcctgcctctattaaaaatataaagttagccgggtgtgtggtcggcatctgtaatcccagctaattggaaggccgaggcagaattcctcgaacccaggaggcagaggtagaagcagtgagccaagattgccccactgcactccagcctgggcgacagagtgagactccgtctcaaaaaaaagagacaaactcagggtctctgccctcatgcatggagcttccagtcgcgtggtgagataggctcccataaaatcatcccagataaatgcgtcatcacagagaagggctgtaaacggtgcacaattccacgtgagtataaaatcagacaacctgacctaatgcagtctagagaggtattgggggaggttttcttcgaggaagtgacattaaagagttaaaccaaggctgggtgcagtggctcatgcctgtgatcccagcacgtcggtaggccgaggcgggtggattacctgaggtcaggagtttgagaccagcctgactaacatggcgaaaccccttgcctactaaaatacaaaaattagctgggcatggtggtaggcacatgtcatctcagctactcgggaggctgaggcaagagaatggcttgaacccagtaggcggaggttacagtgagccgagaatgcgccactgcactccagcgtgggtgacagagtgagactgtctctaaaaaataaaaaaaaataaagagtgctgggcatcgtggctcacacacctgtaatcccagcactttgaggggctgcggcaagtggatcacctgaggtcaggaatccgagaccagcctggccaacatgatgaaatctcacctctacaaaaaatacaaaaattagtcaggcgtgggggcacatgcctgtaggctgaggcacaagggtcgcttgaagccaggaggtggaggttgcaccaagccaaacttactgcacaccagcctgggtgacagagggagacactgcctccaggggggaaaaaaaaaaaaaggagttaaaccagctgaaaatggaaaaaaggtggcagaaccagcatgtgcaaaggccctgaggtaggagggaacacagtgcatctggggaactgagagaaggcactggtggctggagccaggagatcatggggcagcaaggaacaagaggctggaaaaaccggtcgcagtcagaccacacatggcatgggagactcgggtcaggattccaacttttagccaagactgacagaaagcagaagccaccaatgagttttaagcaacgtgtgacatgttgcctggcaaccaaggccaaatgtcacctcaacaccacaactgggccagcctcctccaactcttttcactctgagcacagaataccatctcacccatcttcccagtgcccagttcgctccaggaggtgaaggttggagtttctttccctcctatattccctgtggagcccagcatggggctaaacaaatgtgtctagccgcctgacatgagagacagggcaatctgctttaggccagcccccacctaaaccacctgacttggtttcaagaaattccagggatctttacccgtgtctgtgctcattgtcatttcaagcttttcatgctgaattttgggtcatgaaaatcatctggactgggtgcggtggctcacacctataatgccagcactttgggaggccaaggcaggacaatgacttgagcccaggagtttgagaccagcctgggaaacacagtaagaccctgtctctacaaaaaattttaacattagctaggtgtggtggtccacacctatagtcccagctactcaggaagctgagctaggaggagctcttgaacccagaagcttaaggctgcagtgagcgttggtcacaccactgcactccagcctgagcgacacagtgaggctctgcccctcaccagaaaaaaaaacaaaaatcatctgaccctacggtctagctgaaaggtaacaggtgaaagataacaggtctgatgtgtaactggctgcttccttttgagttttcaagtccccattctggaaaatgaaaaatgtgggtgaggagacaggtcataattaagaatgtgtttatttcaccacttggctttgtcatgcggccaagttgcctgctgtccctgaaattagcctgcagcgttcaggaacctctttctcatgagtagtggaatgtggtgggctcgggggtcagaaatgacaagtgtgtggccaggtgtggtggctcacatctgtaatcccagtactttgggaggcgggccagtcacttgagcccaggagctcaagaccagtctgggcgacagggcgaaacctcatctccacaaaaaaattaaaaaaattagtcaagcgtgggggtgcacacatgtagtcacagctacttggaaggctgaggtgggagaatcacttgaatccgggaggtggaggctgcagttagccatgattgtgccactgcactccatcctgggtgacagagtcagaccttgtctcagaaaaaaaaaaaagaaaacaaattaaaaaaaaaaaaaaggccgggcgcagtggctcatgcctataatcccagcaccagctctttgggaggctgaggcaggcagatcacaaggtcaggagtttgagaccagcctggccaacatagtgaaacgccatctctaccgaaaataacaaaaattagctaggcatggtggcgcaggcctgtagtcccagctactcgggaggctgaggcaggtaaattgcttgaacccgggaggcggaggttgcggtgagcgccacggcactacagcctgggcaacacagcaggacttcgtctcaaaaaaaaaaaaaaagacacaaacgataagcgtgttgtgcctggctccactctgggtccaactttgacaagtaacaagccccctggctttgatgttccttgaatataaaattggagttaaatgaggattaaatgggcctggcatctctggcccttccttcccatgtcctgcgatttggggtaacttctctggcttcctggagggtcactaagggtaaggcgagagaggacaccagagtcacctctgccccttgttatggtcctgactctgatgacaagttaaggaagaagccaggaacagacagtcctcggaagctctggacacatccgggcagatctaagagaaagtgccccagccccactccccggctaccacctttcatgtttttttttttgtttttctttatctgcatgcttattttttacctactttaaaaattccattccctttaaaaacaaaaacaaaaaaaaccacatttatttttaaaaataaactttggatcaccaccataaatggagaattattaacacttgtccaaaatagacgatctttaaaaacaataaaacaggagctcaaaacccggtctccttgttacaaagagaggatagtggttgataggttgagaaggcagggtaggacccaactgggactttctcagggacgtaatcattaggaccaaatgagaaatgaaaaacaggcaggacgcggtgctcacccctgtaatcccagcattttgggaggccaaggtgggtggatcacctgaggtcaggagttcaagaccagcctggccaacatggtgaaaccctgtctctactaaaaatacaaaaattagctgggcaaggtagcaagtttctgtaatcccagctactcaggaggctgaggcaggaaaactgcttgaacccaggaggcagaggttgtagtgagccgagatcgcaccactgcactccagccttggtgacagagtgagactccatctcaaaaaaataaaaattaaaaaaagaaatgaaacaaacattcctctgtcatttaatgcgtctgtgcacaaccggacaccatctcatgcacaactgaaccccacgttgcaggaagccctgatttaaagcatccagctcacctctagcgaatgagacccccctgagctgctcaggcagtcaatagagcagagactacaagtactaaccctggagttggccagggttcaaatcccagttctgccgctgaccaggggtgaccctgagtaagtcacttagcctctctggcctcagtttctggtgctgcaaatagtatcttcacaggtgtgttgtgatggacaggtgagttaacatagacaaggcactttgcacagtgcccagtgcacagtgggcgctctataaactccagccactatcatcacttaaggagcgaatctcacctgccctgtctgcgccttgtcagcctccatcagcttccaggtctcctccttcttggcctcagctttctgcagttctgcggtgctgttgtggtgcctgctgatgtccccactataggaggaggagctgctgagctgtctggagaagcaaagcacaagggtgtcaaccgtacagatgccttgggcagggtcggagggctccctgctgggactgctattgtgggtctgaaccatggcataagagacggagtgtttccacatgcacacatgtaaacatatatatgaatatatgcaccacacccccaccatgtcactctccaggtttataggtacccagagaaaggcagtgtctcaggcaggaatgagacccatgggaaacgcaatctgtgatgatctctgggggcctgcaaaaagcccatgacaactggtatataaaaagtgcgtgcttttttttttttttctgagatcaattagaattcatctcaaaaaaaaaaaagccaataaaagatataacagaaagggcacatcgtagatcatttttcaaacatgaaaaagattcaaaatgtaacatatgatgaaaaacatagggcaaagtacccagctagttcgattttcttgttttacaaatgtggtgggcactggggtgggatcttgcctgactgctccttcatgcaagcgtgttactcagaaagcattatttggccaggtgcagtggctcacacctgtaatcccagcactttgggaggccgaggtgggcggatcacttgaggccaggagttcaagactagcctggccaacacggtgaaaccccgtctctactaaaaatacaaaaattagccaggcgtggtaccgtgcacctgcagtcccaactacttgggaggttgaggcaggagaatcgcttgaatcccagaggcagaaattgcagtgagccgtgattgcaccactgcactccagcctcagcgactgagtaagaccctgtctcaaaaaaaaaaaaaaaagcacttttcgcacatcagtggtcatgagctttatgcagacccccagagatgatcacagattgcgtcgcccacagttttccgttcagtggctgacatcgcgccactgcacactgcactccagcctgggcgacagagggagactcatgtcaaaaaaaaaaaaaaaagaaaagaaaagaaaagaaattatggagaccatgcaaaacacagctgcggctcactgccgtggaaatttctatactttcctctacccacttatctcctgcacaagattataagctaactgaggtcaagagccccatatgagtcatccctgcacccccagaactgtgtcccctgaaaacacttcctgaaggccgaataaacctccaccacctcccctctttgaattagcgcctgggattgggtaaactttccttacccatgagatctgtgcaaaggtctttagttaaggcctagtgaggtggaagtggccctcaaatctgaaagcaagagtgagttttcagggagtggcagagggagcaactggaaccaactctggatggaatctagaattcaaatggggagctggggcttcctgcttcatgacctaggacttcacacatccacacacctcgacagaaaatcttacatccttctacactcatgcactgtctggagtctcccactagaatttaggctgtgtaagattgagaagtgacagcgtgctggcagccctcgcagccctcgctcgctctctgtgcctcctcggccttggcacccactctggcagcgcttgaggagcccttcagcccgccgctgcactgtgggagcccctttctgggctggccaaggctggagccggctccctcagcttgcggggaggtgtggagggagaggaacgggagggaaccggagctgcactgggcgcttgcgggccagcgctagttctgggtgggcgtcggctcggtggaccccgcactcagagctgccgggcagccccgccagcccgggtagtgaggggcttagcacctgggccagcagctgctgcacttgatttctcaccgggctttagctgcctccccgccggggcagggctcgggacctgcagcctgccatgcctgagcctccccacctccccgctatgggctcctgcgcggcccgagcctcccggacgagtgccgcccctgctccatggcgcccagtcccttccaccgcccaagggctgaggagtgagggcgcacggcacgggactggcaggcagctccacctgcagccccagtgtggcatccacctggtgaagccagctgggctcctgagtctggtgctgacttggaggccctttatgtctagctaagggattgtaaatacaccaatcagcactctgtatctagctcaaggtttgtaaacacaccaatcagcaccctgtgtctagctcagggtttgtgaatgcaccaatcaacactctatatctagctaatctagtggggatgtggggaacttacgtatctagctcaggggttgtaaacacaccaatcagcaccctgtcaaaacggaccaatcaacactctgtaaaaacagaccaatcggctctctgtaaaatggaccaatcagcaggatgtgggtagggccagataagagaataaaagctggctgccagagccagcagtggccacctactggggtacccttccaaactgtggaagctttattgtttcactctttgcgataaatctttctgctgctcagtgtttgggtccacattgcctttgtgagctgtaacactcaccatcaaggtctacagcttcactcctgaagccagccagagcacaaacccagcgggaggaacgaacgactccagacacgccaccttaagagctgtaacacttaccgcgaaggtctgcagcttcactcctgaggccagcgagaccacgaacccaccagaaggaagaaactccgaacacatccgaacagcagaaggaacaaaccccagacgtgccacctttaagaactgtaacactcaccgtgagggtctgcggcttcattcttgaagtcagtgagaccaagacccaccaattccggaccataaccatgtccggatgataaccatggcaaaagcgacatctacgaagtgtttgtctgttccaggcaccgtgctatgccgcatggtctttgctctctcctgacccctgtagcaactgcaggtccgggatcctttctcagatctccgcggtctgatacgtttaggctccgactttgtcaatttttgttgttgttttactgttttctgctgctgctgctgttttgttttgtttttgttttttgagatggagtctcgctctgtcacccaggctggagtgccatggcgcaatctcggctcactgcaacctccacctcctgggttcaagcgattctcgtgcctcagcctcccgagtagctgggactacaggcgcctgccaccatgcctggctaatttttgtatctttagtagagacagggtttcatcatgttggccaggctggtcttcaactcctgtcctcaggtgatccgcccgcctcagcctcccgaagtgctgggattataggcatgagccaccctgcctggccgacttagccagttttttaaaagctaggatggttaatatactgcatacgctataaatccccagggatctaaggaagccctctataatcaaacacgagcatacttccttttttgtagagatgaggtcttgctatgttacccactgtggtctcaaactcctggcctcaagcgatcctcctgcctcaacctcccaaagtgctgagattacaagcaggagccaccacacctggccttgagacagttttaaatcaaatgctgcttcacaaagcctgaaccttccaggccccgccaagagacctgagcaaagacccacaccatgtagggagcccgagtgtcagaagcgtggacagctggttaaatcatgaggcctgtgtgagttgtgccacctggcaaaaagagtgccacattccttctttgggcctctgtactctgaaaagcaaggtccttggaggatttgggagggaaggtaaaagcccaggccttccaggacctcagggggctgaggcctttttttgttcctcctcttgtcctcccactggcagggcagggtccttaggttggggccttcctccccgcccttacctctgcagttgcttccctgcactgtccgtcaccagcatgccattctccatttgctttgcttccttccctggaccgctgacgcccgtgacccctggcagaagagagacaaagggggcaagtggggttatatgaggcagatgctaaaaccaagggcaacaaaaaccggccacttcagtgaggagaccacagagcacctggccgccaggatgatcagaaagtaggagacctgctctgcagaggccatgaacaggctgtctggttgtggggcaggtggtatctgggagctcagtcccttggggtagggacagtgctttgcaactgtgcagaaggctccatccactgagggcactgggcctgagccagcatcctgtgccagcagcaatgggtaaaacccagcccagaaaacagtagccctgctatgttaagctcacttcctaggaccaggatgcaaggaaacgcatgagggaaagggcatagccccgtgattcccaagcattgaaagaagaagtgatattcaaaatagataaccaatttgacaaggccatcagccaacaggcagaggcccggagacccctgtagtgccaggagttaacccttcagttcctagaccacagagaggtcccaagagttcagggtaaaaggtacctggggcagtggctgtttccacagtaataaagtatttcaacatttgaactggggaaccaagttctgccaacaaccaggtgagcttcaaagtggacccttccctgattgagtcttcagatgagaccccagccctggcagatgccttggttgcagaattaggaaggacactgataaggacaccaagggacacagcagctggatatctgccctgatcccaggaagaatccacccagcatcaacaataatcaccggaacatcaacaatgacaatgacagccaacatttatcaagtgcactcgggcaccgtgtgtcgtgtcaacacagatcatatctctttcccggttcacaataactcagtgatgatgatgactactgcccccactccgcactgactgcctcattctttggtgccaggagagaaagcagcacaatgtaaggcaccacagggctgaccccagagaaggtgggagaggacccaggacagaagatacaaaagggataaatacgcagccagcagcatggtcagggtgacccctgggaacatgctcgggtgatgacatgaataaaagcagagctcaaaaatgcaaaatcttgcagaaacagccacagggagacacagacacacctggaagggaagagggggctgcagatcattcctggacagagggaggcactccatgccaggaattctcagtcttggttgtaaatgagtcacggggggctttataaatgagcaggtggccgccgggcacggtggctcacacctgtaatccccagcactttcaaggccgaggcgggcagatcgcttgaggccaggagttcaagaccagcctggccaacatggaaaaaccccaactctattctaaaaatacaaaaattagctgggcgtggtggtgcatgcctgtaatcccacctactcgggaggctgaggctctagaattgcttgaacccgggaggcggaggttgcagtgagctgaaatcatgctaccacactccagcctgggtgacagagcgagactctgtctaaaaataaaaataaaaaataaaaataaaaaaaaaatctaaaaaacacgaataaaagaaaataaaccaaaaaattaaaattaaaaactgagcaggtgccctcgtgtccagcccagtccctgctatgagtctcgattagagctccaggaactgtgatatgtgggaagtgttctctcacttcctggctgtgccccttggggaaatgataaatctgtctgagcctcatcttccacatctgcaaaacaggaacagcagacccaaccttcatttgcgagagggtgaaacgagactgcacgcagtgcctggcacagcaagtgttcagtgatggcgacccccgtgttgcttattactaaatacatttttaaacaggttctacagagaattctaggcacagccaggaactgagaaactctgctttaaacattccctttaatgtcagcatctgttttgttttgtctaaactaactaaacactaacttaaaaaacaaacaaaacacaaatagccacatcacccaggaaggaagaatgataccaagcaggacttcccatgcagcctgtcctcacacacatgtgtgacactgggaaccagccatgcccttaaccatctttctctgtgcagggatgagaatgttccagaacactcccagggacccccatctggaggctgcatgccgcagagagcccccccctctcctaccagcagcctcaggccaccctcctataagcctcagccttcacttctcctgttcgtcactgagcgcagccaccatggtcagctgggagcttctgcaggcatgcagtgctcgctaaggctgtcttaccctctcaacccaccaattagcccacaggtcgaactgggcagctggaaaattccactctgcacggaggaggaccaagcgcctaagaggaggaatctgaacatcagttagtccaccatcctctcagcatttttttttttccttgtcttgagacaaggtcttctctgtcgcccaggctggattgcactggtgccatcttggctcactgcaacctctgcctcttgggttcaatcgatcctcccacctcagcctcccaggaagctgggattacaggcatgcaccaccgtgcctggctaattcttttgtatttctagtagagacggggtttcaccatgttggccaggctggtctcaaacccctgacctcaggtgatccacccacctcggcctcccagagtgctgggattacaggtgtgagccactgtgcctggccccctgttggctttttgaagggatcagctctccctcttcctacagccttggtgggcctgtcaatcagggtgcctcagattcccccagccaaggtgggcactgtctgaggtcgccccataaaagcccctctcccaggatttgaaccgtcatcagtggtctacaaggaccaaagacagttcaagttcacctgtcctaaaagagtctagtctcccagagttcccatttcctgagtcctacttgctcagttctgcctttgattcatgagttacctggtatccttccaggaaacaccctctgtttgtttaaggtggccagattcagcttctgctgcttacaaaaaaagcccttggctgggaccctaagccacacactgcagaaggcaggagggatgggtccagtctggccactggaattccactaggcgacatccctcttcagggtccccaccaccacctgctgcagttccccaacaggcgctgatcaccctgcattgtctgggcccatgtgtgtcttgactgtgccccaggatctatgcgtggcagctcacaatcaaactgttgccatttattgtccatccactgtgtgccaggcacttcataagcatggtcccctcaaggcatgctggtcacggtaacgtgatgcatgaaacagtagagcttacccaaggtcatcagtgacaataaagggatctggggactcaggctgtatcccccagtgccagcctcaaagccagacacacagtaggtacccagtaaatgtgtgctaaatgaaccaatgaacaaccggaggggtgaaaacacagacatctgacggcacctccccagacatgcagcgacagtctcggcccgtctctggcctcattctatgagccaagccaactccaacccgggcagtactgacctgcttcctcctcgtccatcactgtgctgcctgggaattcagaagacccaagatattgttaagaagcaaagcgaaactcccgccctaagcccctatctaaataaaggagtgaagggagtgtcttttctaaagggggagaggcaagaatggctgaagggtctgctccatttgtgcgtcagtttccccatcccacatgtgctgggtggatccgggacaagcacactgcacaagaccaacccctttctccaaagtcataactgtgttgggtttttgtttgtttgtttgtgacagagtttcactctttagcccaggctggagggaagtggcgtgatcttagctcaccgcaacctccgccacccaggttcaagcaattctccagcctcagcctcccaaatagctgggattacaggtgcccgccaccacacctggctaattttcgtatttttagtagagacggggttttgccatgttggccaggctggtctcaaactcctgacctcagctgatacacctgccttggcctcccaaagtgctaggattacaggcgtgagccaccatgcctggccaaagtcataactgtgtttaaccataaatagagctaaacaaataatgcagaccaaccttcagtcttcaggcttgtttttacgcaggagaggaaaagaaataaagtattacagtaggcaggccaggcatgacactgggaggtggcatgggcatcagctccagcccctttgaggacagacactgctcctgagaggggctggccccacacagagccagatgcacatgtgcccaagaggagaagaaaaggtgacttagcccagatatcaccctggaccctcccaggctgggatgggggctccttctctgtgatttcccaggccctcaagcagccctccatcactgcatttagcactatgatacccttaattgtttggcgtttgtctctcccatcagactgtgagctctcaagggcatgaagtgggtcatatccattactgtatcaccagcacctggcacagcaggtggccaagtgcagttacacaagatgcacactgcacaactcaacgtggggggcaccattccacacagaggctcacgtaccaggtggccttgtggcacacagcaggcactctgtacacacccgacagacagatgggcagactgacaagtgtatagtcaagtcaagaagcagagctgacttcccaatgccagaggggcccctctcataggcaggactgacaaagctgctttctaaagcagacctgagagggggtgaaatccactcctattttctcctagtctgaggtatttatctgcagtgtaaacatccaaagccctccggcctacccactgcttatgcaggacatgccttgaacagccaaggtgcgattcatccactcatttaacacatttactgagtgtctactatgtgtcaggctcttttcttagtcctggggatggagagacaaccaaaaagccctcagagcagccgggcacgatggctcatgcctgtaatcccagcactttgggaggctgaggcgggtggatcacttgaggtccggagttcaagaccagcctgaccaatgtggcacaacgccgtctctactaaaaatacaaaaattagccgggcgtggtggcaggcatccgtaatcccagctacttgggaggttgcggcaggagaatcacttggacccaggaggtggaggttgcagtgagccgagattgcaccattgcactccagcctgggcaacagcgtgagactcccaaaacaaacaaaacaaaacaaaacaaacaaacaaaaccctcagatcttaaattccaaaggaagagatcaacaataaatgaacaagtagatccataatttactccaggcagcaataagtgccacaaagtaatcaaagcagggaagaagagggacatgaaggctgggggccagggtggagaatgctataaagtagcaagagttctttcttttttttttaaagcaaacacacgaaacttgtaattcagtgactgtcactgagttcatgcaaccaccaggtgttgggttttggatgctgtcaagccaggtgctgtttctacccttgacccacgtacgttaagtgctgccccgggtctgtgtattccgttgccagtcctctcactgtttattccaccaacactgcctttactcaagaaggttctggaactctgcttgggcaaggtccagcaggccagcctccccggagggaagaattcaactcacagctttatagtcaacgcctcatttttgaccaaaaacggcattcactggctgcctcactgacctcctcccccagcctcggcagagaaagctcttcatcctcaaaagaggaagaaatccggcctctgaggacagccagaaggaatgtgggggtctgtctgatgaactctctcggcagctgctctgtgctgacaactaatttgtgtaacttggggaggtgcttatggcccactgttaagaaaagaaatcaaaaggtggcaggagatgagaaaactctaagatatactctcaatcttgtcaagggagaaggcctaggaaggaaggacaggtgaaaaagatgccaaagctaacaacagctccccttctgggcagtgagggcagaaagatgttctttctcgggagtttttttttgtttttttgttttttttttgagacagtctcgctctgttacccaggctagagtgcagtggcacaatcttggctcactgcaagctctgccccccggattcacgctattctcctgcctcagcctcctgacatttctgtatttttagtagagatggggtttcaccatgttggcgaggctggtctcgaactcctgccctcaggtgatccgcctaccttggcctcccaaagtcctggcattacacatatgagccaccttttttcctgattctttgtactcttttgtagtttgcaaatgtctacgatgagcacatgttgcttttataatcattaagaaaaactcggtaaatacttaagagggaaaaatatttgccatgaggttaacagatggttcaagcaaggttttgaaaaatggccacgggccaggtgccgcgactcatgcttataatcccagcatttgcattttgggaggtcaaggtgggaggatcgcttgagcccaggagttcgagaccagcctgggcaacagactgatatcccatctccataaaaaaacataaaaatatataaataaaattttttaaaagagaaaaatggccacattgttggaataaagatccttctcccaagaggacaagggaagaattcagcagtgtgaagtcggagcacacagggtttcttgctcgtggtgctttggatgtcctggcaaggggattccctgtcacggggggcagggtaagggggaattcgtcttgagtgctgtaggatgtttagcgacatcgctggcctctaccctgcttgcctgccaggggcaaaccccactccagttttgacatcccaacatgtctccaaacattgccaactgtccccagggtgggggcaatttgcccctgatggaaaaccactgctctaggtattaggttcctaagaaagaaaccagagtcatgaagatgtgttttaccttccaggtatgaaggttaatgagccatttttttaaatcccttaaaaatttgttcccctaaggggcttgaggcaatctgtgaaaatggttcactattcactttatccagaaaacaccacagaatcatgcagatcaagaggttcaaatcttcgtgttcaccttaagaacatttgtgaggccgggcatggtggctcatgcctgttatcccaacactttgggaggctgaggcaggaggatcccttgaggccaggagtttgagaccagcctggtcagcatggtgaaaccccatctctactaaaaatacaaaaattagctgggcgtggtggcacatgcctgtaactccagctactcgagaggctgaggcacaagaatttcttgaacccgggaggtggaggctgcagtgagccaagatcgtgccactacactccagcctgggcaacaagtgagactctgtatcaaaaaaaaaaaaaaaaaaaaaaggccaggcgcagtggctcacgcctgtaatcccagcactttgggaggccgaggcgggcggatcatgacgtcaagagatcgagaccatcctgactaacacggtgaaaccccgtttctactaaaaatacaaaaaaaattagctgggcatggtggcgggcgcctgtagtcccagctactcgggaggctgaggcaggagaatggcgtgaacctgggcggcagagcttgcagggagccaagatcgcgccactgcactccagcctgggcgacagagcaagactccgtctcaaaaaaaagaaaaagaaaaagaacactcctgaaagcgcccaggccatcaaaggtatgcacgtacaaaaggccacaaagtatcagaaagatgccactttacagaaacaacatgtaccattctgacattataatggtggagttggtagatgtacccaggccaagaagtggggctggccacaaggtcggcggcccaaaaagagcactgaatttctgctgcacatgcttaaaaatacagagagtcacactgaacttaagggttcagatgcagattctctggtccttgagcatatccaactgaagaaagcacctaagttgcgtcgccggacctacagagctcagggtcggtcggattaacccatacgtgagctcactctgccacatccagatgatcctgcctgaaagggaacaaactgttcctaaaccggaaggggaggctgcacagaagaaaaatatatcccagaagaaattgaagaaacaaaagcttatggcatgggaataaattaggaataaaaggaatgccattaaaagttaaaaaaaaaaaaaaaaaaaaaaaaggagagagggagacaaacagtaaaaaagatatatttcttagaaatcagtaaactgaatatcccgggagagaggtcggtatggccccattcacaagcctggttcctgcccatcccccctcaaggattctcccaaaccaaataccaacacctgcaccccttcagcctgggtgttctaaaaaaaagagctgattaatccaacaaggaaaaaagttcccctttaggaagagccaaaaatgtggtttaaacaaacccaaggtcattggcgcttcgagttggctaaggctgggcaagaccagaccctgatgtcaagactttatagccagggcccctccagagcaatggaaaagggtgggtggtgagagaggggggtgccccagtttgatgtaagacccactgccaaggacttctatgtaacctcaaaggcaggaggtagggaggtcaaactgggaaaatgaacgcacgaggtgccagggtggtgggcggcatttgcatcaccaaattaagtgctgatgtgtacaaaaatcacaaagcatctggcagccttccatgttctgtatacactgcttggatactctagcagctgggaaagaaaggcgggggtgcggaacctatctggggccaagagagtttaaggacattttttgctcacctggacggaagggtagagagacagacctcacgctgggcaaaagattcagctaaacccacacattttgatttagagagcacaaagggtattgtcacctaaaagtagcctgccaagcaggtcagtgaaaaagtcaccgagaagttgccacaatgcattgctcgggctgagagatagacaaagggggattctgcagcaagaagaaacaggctagactcaaggtagaacttcccaaccacaagggaatgaacatgcagaaattcagtctaatcaaataatttaaaagctgaagggaatgtcagctatcatgcactggcaagaaacaaaaatccaactgtattttgagacatggtcttgctctgtcacccaggccagatggagtgcagtggcatgattttggctcacagcagcctgactcccaggctcaagcgattcccccacctcagcctcccgaatagccgggactacaggtgtgcaccaccatcccagctaatgtttgtactttcagtagagacgaggtttcaccatgctgcccaggctggtcttgaactcctaacctcaagtgatccacccgccttggcctcccaaagtggtgggattacaggcacaaaccaccacacccggccaccaacttttcctttaaaaccaccagggctcatgacagcagtattcacaagagtcagaaagtggaaaaaacctgaatgtccatcaaccagtgaacagatcaacacagtatggtctatctgcacaatggcatattattccgcaataaaaggaaatgaagctacaacatagacgaaccttgaaaacaccacgctaagtgtaaaagccgccagtcacaacattccacctattgtgatggcatttatatgaaatgtccagaataagcaaatctagagagacagaaagattagtggttgcctagggcttcggaggtgctggggaaaatagggagtcatggctgatggattggggtttcttttgggggtgattaaaaaaagttctaaacctgactgtggtgatggttggattttgtgatttaagtgggttaattgtatgttgtatgaatttttgttttgttttgttttgtttttctgagacgaagtcttgctctgttgcccaagctggagtgtagtggcacgatctcggttcactgcaacctccgcctccaaggttcaaactattctcctgcctcagcctccccagtagctgggcctataggcgtgcgccaccacgccaggataatttttgtatttttagtagagacagggtttcatcatgttggccaggctggtctccaactcctgacctcaggtgatccacctgtgtcagcctcccacagtgctgggattacaggcgtgagccactgcgcccagcctacgtgtgtgaattacatctcaagaaagcacttattagagatcactaggacctctgcagagaaggagctcccaccccaggcaaaggatgagaaactcagagaccaacttgagaaccaaccctgccagcagctgctgtgtatcctggggctggtcactttgcctctctgacactcagtggcttcccagggcagttagaccaaaacccacctggaaggccctgcaggacaatcactgtgctgacctcttctcctgccccccacgtcctggcacaccatggtctggccacaccaccctttttgttttgtaaacaaattgagctcatgctggtcctgaggcctttgtactggctgttccctctgcccacaacacttcccagatcttctccctgctggctccttcccatgccaatgcaacctccccagagagggtttccctatcccctgcctgagttgccacaatgacacccatcactcctcagcccatggcattgtcttttttgtttcccctccaaagcacttaatagcatctgaatttttttttttttttttttgtagagttggggtttcagtatgttggccaggctggtcttgaattcctcctggcttcaagggatccacccaccacggcctcccaaagtgctgggattacaggcgtgagccactgtgcctggcaaattttttgtattttttgtagagatgaggtttcgccatgctactgaggatggtctcaaactcctgagctggagcgatcctcccacctcagcctctctatgtgttgggattacaagtgctgggaaccaccacgtctggccctgctgaactgctttatgagggaggaaagtgaagctcagatgggtctgaagggcaggcctcaggtcacatagctggggagatgagcggccggggattgaacccagacgtcaccaacccgagcctgccagcttaactccgtgcttcacctcacaaccctcacatctcttgtgtcacgtatgtcctcagtttctctcagccccgagagccaggactttaattaccatcattcccatttttgccataaggaccctgaaactcatcaggtccaaggtcatgttccaggaaggcgctagaccctgccctgaggtcagctgagctgaagcctggtgctcccatcccctggccataaagcaccgagactctctcccagttcagcactgcagggactaaggtggttttccacattgcttctttagggggctccatccagctcccaccctcatgccctgaggagccgccttccccaagtggctggtggcaacctcaaagaggccaatgtggcccttcaaggtgccagacaccctgagtgggtggaaccctggggctgcccctaccgttctcctctgcatcctgctcctgctctgtgctggcataggtacgcaggaactcagcgaaggcgccgtctcgagccagcagctcctggtaggagcccatctcagagatcttgccgccactcatgacgatgatgacgtccacctgcggcaagtagctcatgctgtgcgtgaccaagatccgcgtctgtgggcaaaggggacacccggccacgtgagtgcacatgtgtgagactgcctagcttggcagagtgaagactaaaggaggaatgagccgacgaacacctggtgggcaaaactcaggtctgaaggtgggacatgcacccgcgataacagcatccaggagcagctgaacctgtgcacacggtcctgtaacatgcatgtgcaaagggcctgccacgcctcaggtgctgagctaaaagctggggaaggggaaggaaacaaagacccctgccccagattccagggccgcaggagaaacgaacactagtagaatagtgcttgctgaatggcaaaaacacagcaaaaaggggaacgggtgtaccaagtgtgcgggttttgcaattttaacaaaggtaatggggaaggttattttttaacaaaaacctgaatgacaagaggtagggagggaaccatacaagtgtgtaaaggaataaaaggatggtgccacagcaaaacagtttgtatgcaatggcttttttttttttttttgagacagagtttcactttgttgtccaggctggagtgcagtggcacagtctcggctcactgcaacctccgcctcccgggttcaagcaattcccgtgcctcagcctccctcccgcgtagctgggattacatgcgcccgccaccacacctggctgatttttttgttgttgtattttagtagagatggcgtttcaccatgttgcccaggctggtctcaaactcctgacctcaggcaatctgcctatcttggcctcccaaagttttaggattacaggtgtgagccgctgcgcccagcccaatggcttaatttttttcttcttttttttttttctttttgagatagggtctcgctctgtcgcccaggctggagtgcagtggtgcgacctcggctcaccacaacctatgcttcctgggttcaagcgattctcctgcctcagcctcccaagtagctgggactacagatacgtgccaccatgcccagataatttttgtattttttgtcaagacaggggtctcatcatgttgtccaggctcatcttgaactcctgaactgaagcgatccattcgcccttggcttacaaaagtgcctgggactacaggcatgcgctaccgtgcccagctctggcttaatttttttctaaaacaactcccgctgtcagccacccccaaaaccactacaaaatatgcacatgcatacattttatctgcaaatctgaaagtttgggaagacattcatcaaactattaatagaagtcagcatatgtttccttaaacagctaacggtcaatcttttcagctttatggatcttacagttgccatggcaccaactcagccctgccgagttgaagcagctgtagacgatgctttaaagaacaggacacgtgcggtggctcacacctgtaatcccagcactttgggaggccaaaacgggaggattccttgaggccaagagtttgaaaccagcctgggaaacatagtgagacctgtctccacaaaataaaaataaaaataaattagccaggcatggtgctgcatgcctgtggtcccaggagctactcagaaggcaggaggattgattcagccgaggagctggaggctaccatgccatgactgtggcactgcactccagcctggacaacagaggaaaaccctgtctgcagaaaaaaaaagaaaaaaaatacattggccatgttccaataaagttttatttatggacactgatatctaaatttaatacgattttcaaatgtcataaaatattcttcctgtttagatttcttctatttaaaaatacacacatcattcttagctcaagagccatataaaaagcaggcagtgggccagatttgctaacccttgctctctaagagaagaattaaagattagggatgcaggatgaagagggactattttatttactttatttagatatattttctgagacggagtctcgctctgttacccaggctagagtgcagtggcgcaatctcagctcactgcaacctccacgtcccgggttcaagacattctccggcctcagcttcccgagtagctgggattacagccatgcatcaccacactcggctgatttttgtatttttagtagagatggggtttcaccatgttggccaggctggtctcgaactcctgacctcaggtgatccactggtctaggcctccaaaagtgttgggattactcaccgtgcccagctttatttactttatatacatgcacacacacacacacacacacacacacgcatacacacatatattataagaagatatccatattcttgtacttttcaattttgttacaatgggcatgtattacttagtaattttcaaaaatgttttgtactattttaaaatatgtttacacagaatgttagtggtatgtatgggaacgattacaagaggtcatgtagcacgatgtttcctgtatatatacgtggaacaagataaccctatttaaaaagtttatacacagagcaaaaagacttgaaaaaaatacaaaacctctaaccagtggaatgtgtgtaactgcttccatttttctttttcatgtttttcttaatctatatgccccccatggggatgtgttagttttaaaatcagcagaaacagccgggtgtggtggctcacgcctgtaatcccagcattgcaggagacccaggcgggcagatcacttgaggtcaggagttcgagaccagcctgaccaacatggtgaaacctcgattctactaaaaataaaaaaaattagccaggcgtggtggtgggcacctgtaatcccagctacttgggaggccaaagcaggagaagtgcttgaacccgagatgcggaggttgcagtgagctgagatcatgccactgcactccagcctgggcaacagtagcgaaactccacctcaaaaaaataaaatcagggggagaaaaaaaagagccagtgtgtacccattaccacaactgccctataaaaagaacacaggaactatttcctattatgttaaggtgttgtggcaattttccgacccctctacccacagacacctctgcaagtaagaaaatgcagcctgctaggtcacaggcaatgtcttggagtgggattccccgctaagaagccagccctgtgacttaatcaggaagagaggcctcccttggccatggagaggcaatgaatttaactctgcgcggaggacttacccctataaagacaagtacaagacggctgtcttaggaaggcttccaagacaagcatgagaaatgtgttctttaaagtccaattaaaaacaaagaaagccagagaaagtaaaggactcctaaaggggacacgttctgacttaaccaaagggcgagacggcccaacaccaagccccaccccgccagcaggcaccttgttcttcagcatccccttggggccaatcacattttcaaagatgtgttttcccacatgggcatccactgctgagaggggatcatcgaagaggtaaatgtcagcgttggagtacacggcccgggccaggctcacgcgctgcttctggcccccagacaggttcacgccctggggagagacacacacaggagtgggtttcctgggaaatcttgagactcacaatacgtagaagcaggccgagtgtggtgtgatcccagaactttgggaggccaaggtggaaggactgcttgagaccaggggtttgagaccagcctgagcaatatagggagaccctgtctctacaaaaaaagaaaagaaaagaaaagaaaaaattagccaagcctgctgatgtgcgcctgtagttccagctattcaggaggctgagtgggaagatggcttgagcccaggagttccaggctgcaacgagctatggctgggccactgcactccagcctgggcgacagaatgagaccctgtctctttaaacaagaaagaaagaaaggcatagagcctgctcaggacacagcaggtcctgggtgaaggccctgcagagctgcacccacctcctcttctttaagtttgatgctgaaggcatgaggtcacgcctgcacaaacctggagccaggccccagctccaccaccaccaaggatgggatcacaggcacagggtttagccccacctgtcaactgggcaaaagagaaaacctgaatctcccgtgaggtgctgagcagggcacgtggtgcacagcaagtgctcagcaaaggatggctgacggcaccaaatcatgttgaccagtgggaaggccgtgatcccttagtctcatggaaggcgctggtggacgtggtcatattattgttactgctgctgttggtgacagctgccatgtttgccagcttactctggatctgtcactgtctggcaaagccacatataggtgaagcaaggctccggcctggggatgctgaaatccagcccacatcccagtcaccaggaggaaggacaatgcatggaccagcagcagcgccagctcccaccatgacagataagccaacgtcgtttccctatttggctggaaatcacaggttactgcccagtccctcctgagatgcctgccctgactcccatgcactgaggtggggtcctggcagccacgtgccttctttttgtttttggagacagaatctcactctgtcgcccaggctggagtgcagtggcacaatctcagctcactgtaatctccgcttcccaggttcaagcaatcctctcacctcagccccctaagtggctgggaccaccaggtgcacggcaccatgcctggcaactttttgtatttttagtagaggtgggttttcaccatgttgcccaggctggtctcgaactcctgacctcagacaatcctcccaccttggtctcccaaagtgctggggattataggcgtgagctaccgcgcccagccaataattcgttttttatttccaaggagctgcaggcttatctcaatttttaaacatcattcaccacgtaagaaagccgacagagccctggcttgtaactaaaaacagaaatgggccagtgctttgcactgcttggtcttccaagaggggacacaccagacgaccaccatggggtgccagagcaaagtggccaggcaagcagcaggggaggcaccccaggccttgaaggctcagaccaaggtgtggaggtgggcaggggctgggggttgctgtgaagcagcaggaaaacctgggagatggagcacagcaggagggagggtctgcagtggtgagaggcagagaatggcccttttagagatgacaaaatgagcaggtaacaacatggacacaggaaccatgctctctgcagctctgtggctgtgtggcctcaggtaagtcacttggcctctctgtgcctcctttttcctcaatgattacctaggtataacaacaaattccacccatgggcttgctgtggggaagaattacgtgtaaaatgtttagcatagttcccaacatacagaaaatactcaagttataggccgggcgaggtggttaacatctgtaatcccagcattgtgagaggcagaggcgggcagatcacctgaggccaggagttcaagatcagcatggccaacacagcgaaatcccatctctactaaaaatacagaaattagctgtgcgtggtggcaggggcctgtagtcccagctattcaagaggctgagggaggagaatcacttgaactcaggaggcagaggttgaaccaagagtgagccactacactctagcctgggcgacagagagagactccatttcaaaaaaaaaaaaagaactttgagaggctgaggccagccgatcacttgaggtcaggagttagacaccaacctggccaacatggtgaaaccctgcctcgaataaaaatacaaaaattagctgtgcgtggtggcaggggcctgtagtcccagctattcaagaggctgagggaggagaatcacttgaactcaggaggcagaggttgcaatgagccaagagtgagccactacactctagcctgggcgacagagagagactccatttcaaaaaaaaaaaagaactttgagaggctgaggccagcggatcacttgaggtcaggagttagacaccaacctggccaacatggtgaaaccctgcctcgactaaaaatacaaaaattagccgagtgtggtgatatgcacctgtaattccagcccctcaggaagctgaggcaggagaatcacctgaacgcgggaggcagaggttgcagtgagctgagatcgtgccactgcactccagcctgggcaagagagcaagactccatctcaaaaataaataaataaataaaaagaaagaaagaaaagaaagagaaaatgctcagtaagtgttagctattgtgctattttcagtattatggctatcttgacagggactgtgaacatatgaatcatcgactcccctcctcccaacagcatgccctctgtcatgtgactctgcagtcatgtgaccacaaaggtagaatgtacttccttcttggtcccttgcctttgagcttggccaagtgacttgctttgtgagtagaagggacagtgtactttaagggacattgcatgctttctggggggcctatcttgggcctctgctgccaccatgagaagagcccccctttggaaagctgtggacccctcaccccggtccccagcaaaagctctgtaagtgagacctgagccacacccacagcctggacccaagttcagctggcctgcagcgtgcagcagagccgcccagctgagccctgccgggtcagctgatagcagcagactcacagcccactgagattgtgagagcatttgttacgcggcaacagctgactgattcaggggccaacatccaacctatactgaacttctcgccaatctctgtccgatccccactgggcaggatttccaggtctgggaggagggcacaggcctgtatcacggacctgtaatatggttcctccagctgacatccaaaaaggatgttttctcggagagaatcattctgaatccaggcctgctgtggcacataggccacggagccctaagttgcaaatggagaacgaggtgagacagacacacagacagatctgatcaacgagacaacagctggcccacccgcctgctaggagggcctcacttcacaagtcattttcatcacaactattgctttggcaagagggaaactgactcacaaaggacaacagatgccagggctgggatcagaacccacagcaggtgaatcactgactccaatatcaggagtcaaagagttgatatcctcgttgataagattacagttatttacttagtagctagctattaactcaatgcctacagcggtgatcaaaacccctgcttccaaagagtggaagtccctcaggtgacggaaaactacttgattacagttacggtggacgcaaagataaaaagatatatgacactttttaagagtctaacttgactaggcgcagtggctcatgcctgtaatcccagcactttgggaggccaaggcaggcagactgcttgaggtcaggagttcaaagccagcctggacaacatagagaaatcccatctctaaaaaaaatagaaaaattagccaggcatggcgctgtgcatctgtagtcccagctacttgggaggctgaggtgggaggatcacctgagcccaggaaatggaggtaccacgagctgagattgcaccgtgccactgcactccagcctggaccacagagcaagatcctgtctcaaaaaaattaaaagactgacctagtttgggacatccgggaaggatctttgaggaaatatccttgctaaaaattgaagcaaagactcctatatcaagcatccatttcaaaggcttatttttatttccatatgtcaggtatcacaaacagcatgagaataaaggctagagtaaggatatttgttttgtgtattttgctaatgaaaatgctgaggtagttaattctctatatatttattacgtttgtagaaacaaaatcttgccatgttgctaagcctggtctcaaactcctggcctcaagcaatcctcctgccttggcctcctgaagtgctgggattataggcatgagccatcatgctcagctcaaacatatgtttagacaagaaccaaaaagtgaagaatgagtcagtttcatgaggagaagagggaagagcattcaagtccgagggaacagcacatgcgaaggcctggaagtgaaaagtacttggcacattcaaggaacagaaaggccagcgtgacaggaacatcgatcaatcctgtgagggaacgactggcagaaaacacaccagggacagcaagggggcctatacttggtggggagcatgggctttatcagaggggcaaggggagcccctgaagatttttttttgaaacgaagccttgctgtcgctcaggctggaatacagtgtcaagatctcagctcactgcagtctctgcctccgggctcaagggattctccttcctcagcctcctgagtagctgggactaaaggcacacaccaccaggcccactaatttttgtattttcagtagagacggggtttcgccatgctggtcaggctggtctcaaactcctgacctcaggtgatcaacctgcctcagcctcccaaagtgctgggattacagatgtgagccaccgcgcccagccagaagattcttgaataagggaattctagagagggcaaagctgacagcaggtcccaggtaccctcattcttactctaaattctcaaataattaacctgctgacttgaatatcctaacttttaaaaagccaaaatgtcaacagtggtgccttaccatagaacccacagaaatttcagacataatatacacaaaccacaccaactaaaacatttgggaaaagataaatattttatatacatttctagcactccccttacctaggccaaacaaccaataataaataatcatctggcctgaaatgctaatagtgccaggatagcagaaagctggggttaaggaaacagaaagcaatgtggatcccatcgggatttggaattttcttccattaatctagctctcatggttcattcatcttattttatggcaggaacttgaaagtaatgataaaacatttcttaaaacaacagctaaaggtcattaatttggacccaaccacaatgtatactttctaaaggcactgtataatcaaagaaagggttttgctctgaaataaaaacaatgtcattaactaggccaggagcggtggctcacgcctgtaatcccagcactttgggaagccgagatggggagatcacctgaggttaggagttctagactacccaggtcaacatggtaaaatcccgtctttactgaaaatacaaaaattagccgggtgcagtaatggtgggtgcctataatcccagctactcaagaggctgagacagaagaatcggttgaacccaggaggcagaggttgcagtgagtcaagatcacacgactgcactccagcctgggcaacaaaaaaaactctgtctcaaaacccacaacaacaaacaacgtcataaacttgacattcccaaaggcagattccaagagacaaatgtgcagttgcacagacactaaagaggtgcggacaagtacacctgggacacataaggttaaacagttaatagattttttctccttgcaggacttgtcagagcctttaatttgctaatgtttactgtaagtctccaagagggagggggctggagtatgcattatttcccacgcttctttgagcctggggttctttatcgcccaaatgtcctgcaagatgagctggctgcagaccacactcctggaaatgctggtagcaaaacttccagggacgtgtcgttacactaggaaaaggccttcatggggagtgaactaaatgcaaacaaaggctgttgatttccagtggggattatttgtaaaggagcctcttaagctcactcctggggaatttcaacttacttcaaagtacactgtgtatttaaaagcagtaaaactgcagtcttcttttagctccatattaagaattcaacactaaaaatttaaactgttccctttaaaaaatgttctaagaaaatattccaaccacataaacatttttgttttgttacatttataagaatagatactcagagatccataaagataaagaacaatccaaaaagacccaaacagaccaagagacactcagtgacaggcagagacgcaagggaaggagacacaggctgcgtaccagggagtcttcgtgtgtctactaagtatttcttaagtggccaaatgcggtggctcacacctgcaatcccagcactttgggagacagaggtgtgcagatcacttgaggtcaggagtttgagaccagcctggccaacatggtaaaacaccgtctctactaaaaaaatataaaaattagctggacatggtggcgcatgcctgtaatcctagctactcgggaggctgagggagaatcgcttggacccaggaggcagaggctgcagtgagccgagatcacgccacttcactccagcctgcgggacagagcctgaccctgtctcaaaaaaaaaaaaacacaataataatgataataataataataaaataacagcttaataaagaggtaacaaaataaatatttattaagtgcctactatatactgggcactattttaagtgctgggagacagatggaaataaatgataccaaaatcctgccttctaggacagcacggaacagaacagaaagaacgagagagaaagagacagtggaaagatacaggaggaggaggaaaagagacgttgctgctttcgcttctggcacagggacagtcaaaagaaacaccatcatttctgagcttttcctcagaccaccagcttccccactgcccctccccgctggtcctcatcctaccttgatagccacgtgcccctccactttgtccatctcagccaagagggctgagagcagggacgactttccgcagcccacctggcccaccacggccaccaaagcaccttcggggatggagaaggtgatgctgaaacgacacaacacacctggctcagccacgctgaatgaggcctgccgggctaatgcccatggccaccgagcctcaatttaccccaagtagagaaagagaaagacagaaggcaagactgtactaaacactgaaggcctcaacattccttccatttctactgctgagttcagttcagtgacctgtctcagggggcctccaggtgggaggcaggtgacaggtgtcccttagagaagtgaggcagggagtaacctgagggatcctgtcacagtgggcttctggaacagtttttgcccctcggagaggcagaaactttactgggggcatgacgcaaggtctgaaaggagaggacacctcaagacaaactggggccggacacggtagctcatgccagtgctggtaatcccagcactttgggaggccaacgcaggcggatcacgaggtcaggagctcgagaccagtctggccaacatggtgaaaccccgtttctactaaaaatataaaaattagccaggcgtggtggtggcagggcctgtggtcccagctactgaggaggctgaggcacaagaatcacttgaacccaagaggcggaggttacagtgagctgagatcgtgccactgcactccgatctgggcaagagcgtgagactctgtctcagaaaataaataaaccaaaaaactctgacaaaaagcaggagtgtcccacacacagaaacatgtggagagccggagaaaggtgtaaaggggtgaaggcacagggtgtaaccagggatgcgatggcactgaggtaggtagtggccagacctgggagcaccttgaaatatgccctggaaggacgctgtgctaagacacctgaactctgccagccgggagccaccaaagggttgaaaagggaaacgcatatgaataaatctgagttgaatttcaggaagatgtctctattgaaatcatcctttaacgaacagcagaaagcaaaataaaataagctcagcattcacccagtaagaccggctgtcaatggggcaggtcaaccccaggccactcccactgccgacggcacctccagagcagggtttccatcctcccagggaagggagggcacatccaaacctttgctggactcacttatatggaatgtgcttttattttttatttatctgtatttagttacttaagtatttatttatttttttgagacaagagtctcactctgtggcccaggctggagtacagtggctcaatcttggctcactgaaacctgtgcctcccaggttcaaatgattcttgtgcctcagcctcccaagtagctgggattacaggcgagcgccaccacatccagctaatttttgtatttttagtacagatggggtttccccacattggccaggctggtctcgaactgctgacctccagtgatctgcccgcctcagcctcccaaagtgctgggattacaggcatgcaccaccatgcccagctagtttttttatttttagtagtgacagggtttcaccatgttggccaagctggtctcagacttcggacttcaggtgatgtgcccaccttggcctcccaaagtgctgggattctgtgctttttaactgccacctttctgatttcagagtattagtggaaatgctgatagtcgttgctgtcactgattgtttcattcttatgacactgctgcatggtgacactcatcaggctttttgttcctgtgctgggaggggaaaggattatggggcctgagtgggcaggaagcccagtgagacaatacctgccactgtccacgtgagacagtacctgccactgtccacgtgagactgaaatattcttacaggctgatgagagaaaagggttagagaaaggttctgggggctcatggggggaaggtaactgaacaggaaaaccactgggtcaggaaagggacacagatacagattagttgtgcagctcaacaagacagaacagctacaattgaagcaggcaggatttaagttagacataaggaagaacttcctaagcatgcagtacccccatgaattttcaatgcaggccttctacagattgttttctctggagagtttctctccttcatcataaaatacagcagtgatttggctacccaggcatgagctaaacctctaaaagggtcccatcacccctgtgttttgcggattccttaagggggcctaaaaagctgttgatcaaggcctctggtcagaacaaaatgagaggtgcttgacaagttgcctggggataaggtcaatttcctagacatcatgtgctttggaaaggtaaggactgtagggtgtggggtgccagatagaaagctggcaagaaagggtgagctgggcagctgaggggcactggagttcagcagcatcacagcccctgactgagactggccaatcagcacactcagtgtctgaaggcatagcgattgcctcacagagggcacaggacccaatctgggtcaataagaagcaggcagttctcctaacagtgggatacacagtgggagctgttgggaccatttaccatcacaaggggagaggatgcgtgaggataaagcagaccaggagaaagtgaaacacagaaaatatgaagaaagttctgacggcagagtccctggatcacaccgcacctgaaagtagaacttcccagttacgcaagccaagaatctcctgtattgtctaagtctagctgtccaaggctgctgtaacttacaatcccagggaaccctctgtgctaggcatgtgtgtctgcttctcacgacagcctaagcaggtgtatctgcacccattgtccagatgggtaagctaagtcttagaaaggcaaagtgagttgttcaaggtcacagagagggagcacggtgggaattcgaatccacgtttaacaaaagccctgtggctctctccacaccatcacgtgtgtccacgtcccggcttacccattcagtgtgggagggtcgctcctggcccaggtgaatgtggcattcctcacggtgatgctgttcgtgcccccgcctacaaagcacagagacatgtcagggacaggctgagctgtgcgactccacatgcacagaacactctctttctctgcttgaatggttcaaccccagacgcttggcacgaatggcgctaggcattattatctggtgacatcagccacgggttctgaaagaagaaactcaacctgcagttctggaggcagccccagacccagaaagcagaaggaaactgcaagcagctttgtccttgtaagatggggttgcgccatctggacgatcatcttgggagatgactgcagaggcgggggccgcatgagaattactcaatgctctcgatgccctggcccttctcaggcaggttcggggcagctccagctgggagggccgagcagtggccaaggtcagtgggaaacagctggcgtccacatgcaaacctctctccactggggtggccagcatcagaccgctgggccctccttgaggtgcaaagggaggtcgttcacccttctccccaggtcctctgtcttcctcccccagccacaccactctacacacagcacatcacagcaggtggatctttctaaaacatccatcacgataaactcaaaaaaagaggatacggaacaggaagtgtggtacgagggcacagggaaggggagagtgtcggagacaaagcccacgttaactggttccatgtttctgtcttctcctgagacaggatctggcttctgcacccaggctggagcgcagtggtgcgatctcggcctactgcaacctccatctcccaggcgcaggcgattctcccacttcagcctcctgagcaactgggactacaggatgtgcaccatcacacccagctaattttttttttgtattttttgtagaggtggggtcttgacatgttgctcagcctggtctcgaactcttggcctcaagtgatctgcttgcctcggccttccaaagtgccgggattacaggcatgagacaccatgcccggccagctccacacttctaaagctcctagcacctctgtcttcttttactcttcttcctgttattttccttttacttcatgtctctcacttaaaacaaaagcaggccagtcgcaggggctcatgcctgtaatcccaacacttcgggagaccgaggcgggcagatcacctgatgtcaggagttcgagaccagcctggccaacgtggtgaaaccccatctctactaaaaatacaaacattagccaggtgtggtagcgcatgcctgtagtcccagctactcgggagtctgagacatgagaatcgcttgaaaccaaggcagaggtcgcagagagccaagatcgtgccattgcactccagcctgggcaacagagtgaaactctgtctcaaaaaaaaaaaaaaaaagaaaaagaaaaaacagaaaagcagctctctgaattatgagccaccttaagaccatctggagataatacaggagtattttttgtttaagttgtcaaatgaagaaataacttcctccatgcatcaaaaaaacaaaaaacctagagagagaggaaggtgctggttaacctagattaactttctccctcagctcttctacgagtggacgtggaatgaggaaactgggagttgctatttaaggaatttaagaaaagccactggagacagagaggttgcagagaacggttagcttgggagctgggagcagccaagggggcccccactggctagagcgtgctaaacattccaggaagtccaaccacctaggaggccactattagggcaggaaggaggggctggggtgcgggcggcacccaggggcctaggggtttcctgatgcttgcattgagctgtgaacaacttcagtaccaagaaaccaccccccacccaccgccggccacctcaaatttcagcctgtggttagcagagaaatttgaccccagagtagatggaatcattgccttatgatgtgaggggatgtgggacactgggacagcagaaaccagatgaccacagcccaggagtgttgggaggaagagtccagcatccacttgggccacggttctcaactggaggtaactgtgtccctcaaggcacatctggcaatgtctggagccatttttggttgccaaaattgggatggatactactgtatctaatgggtagagtccagggttgctgctcaacatcccacagtgcacaggacagtccccaaccacaaagaacaatgtgtctccagatgtcagtagcgcccaggataaaaaaccccacaccagggggctgagctgaagatgctgagaccatctcgctcagaccagagaagtgacaactcccaggatctgtttatcatcttctatgcaccaggtgctgtgtcaaacgtgtcaaacgttttaggtgccactaaagatacctgagcgcctgcgaggtgccagacacagctcacgcggtataaccgacgtttacacacattcaatcttctgacattggactctggagccagactgtatgggtttgaatcctggggctaccacttcgtacctgggtagccacaggcaagttagttaacttctctgtgcctttgtttgtttgttttttgagacagggtctcactctgacacccaggctggagtacagtggcatgatcatagctcactatagccttgaactcccgggctcagccaatcctcctgcctcagcctctcaagtaactaggactacaggtgcaccaccatgcctggtgaatttaatttttgtagagacgaggtctcactacattacccaaggtggtctcaaactcctggcctcaagcaatcctccagccttggcctcccaaagtactaggattataggtaggagccactgcacccagcctgtgcctcactttttcatctgtaaaataaggctgacaatcatgcaatcaacttcagagggctgtgatggggtgtctatgaggcagtgcacacagagcacttctcacaatgcttggcacatagtaggtgctcagtaaatctcagtgaggcaacaccctatggccaggaagagcatggactctaccgatgggctgtgggtgtgaatgctggttcttcttttgatcagctgtgcaatctcaggcaagtttcagagaccagtttcttcatctggaaaatgggggtttccatcaccctcctccaggggtaccatggtgagtaatggacaagttgggacattgacatccttggaatggcatgtgcatgacagaggctttataagtgaacgtgtcactgcacttagtgccattaatatttattattattatttttttttttttttttgagatgaagtctcactctttgccctggctggagtgcagtggcgcgatcttggctcactgcaacctccgcctcctgggttcaagtgattctcctgcctcagcctcccgagtagttgggattacaggtgcccaacaccatgtccagctaatttttgtattttcagtagagacggggtttcaccttgttggccaggctgatctcgaactcctgacctcaagtgatccacctgcctcagctccccaaagtgctgggattacaggcgtgagccactgtgcccggcctaatatttattattaagtgcctagagagatggttacaaacaacatccctggctcagggggatgggctgggaaacgataaattaacaagctacaaaacaaacaaacctgccaataaaaatgcatggccaggtgcagtggctcacatctgtcatcccagcactttgggaggctgaggcagagggatccttgagcccaggagctcaagaccaacttgaggaacaaagcaagaccttgtctctccaaataaaacaatttaatattgaaaaaaaaaaaaaggccaggagaactggctcatgcctataagcccagcactttgggaggctgaggcaggtggattgcttgagctaaggagttcgagaccggcctggacaacatggtgaaaccctgtctctacaaaacataccaaaatattatccaagtatggtgctgtgtgtgcctgtagttctagctacttgggaggctaaggtcagaggatcacctgagcccacgaaatcaaggctgcagtgacagctgtgactgcaccactgcactccagcctgggaaatggaatgagaccctgtctcaaaaaaaaaaaaaaatccaagtaacactcagccaaagaaaggtacttttgtttcccttatctagataaactgaggctcagacctaagtctacacagcttgtgggtgatggaggctggccagcctccagagtcctcatttagcccagaatagaatcaaggtcaaagccttggaaagtgactcccacggggaagcctcaagcagctgctgaccctcagcaagaaaacaaaaatgcaagtgcaagttcaccctcctgggaagtgtgagacaggacagaagcccaggaggccaggcttcccttcccttctgcaggctctgcagaacccttgtcccccggggtctcgcagacaagcggctgggcagagtcaaacctgagggcagccaagggaaagaaatgcaagtagggaggacccagtgggagatgggaaggcggccacttccagaagccaggactgaacacacacacaccgtctttgacaggccgtcgctcgatgctgtcaggttccagctcctcatgggagagaaagatcctcaggcgtttgagggagacactcgcctgtacagagagcaatggcaggggagagttatttttaaaaagcatttttgcaaaaccaaccaaggttaactttcaagggtttccccaggtgtggaggggcacacaccctcccttatttctgaaggtcccacatttcttagaaccagtgtatactttagaattaaacaaaacaaaaaaagaaacaggtttggttctgctttgttttaaaagcccacaaaaggtatttcagaaaaaatgggcgaatggctgggcacggtagctcaaacctgtaatcccagcactttgggaggccaaggcaggcagatcacttgaggtcaggagtttgagaccagcctggccaacatggtgaaaccccgcctcagctaaaaaaaaaaaaaaaaatacataaaattagcctggcatggtggcacgcacctgcaatcccagctactcgggaggctgaggcagaagaatcacttgaacctgggaaggcagaggtcgcagtgagccaagatcatgccactgcactccagcctgggtgacagagtgaggctccatttcaaaaaataaataaataaaaataaaaataaaagaagaaaagggcagaggcctggtggaaaagggactctggaaacgtaacagcaaatgcaacagagccaattcaaacagcccaatgggacaggcatttctgagatattccagaaaacttggatatgggctgagtattattgtaaaaacttattgttagtttgcttagacatgatgatggtattacattatgtaggaagaaatgcatgctgaaatatttgtgggtagaatgtaaggggtctgagatttgctttaaaattattcggcaaagaaaggaaagaatgaagggatagatagcagagtttagcattaaaaacaaatgaagggaaagagggacaagggagggatactgaaaaagaatgagataaatcaactgtggcaaaatgttttgggtttttttgttcgtttttgagatggagtctcgctctgtcacccaggctggagtgcagtggcgcaatctcggctcactgcaagctccacctcccgggttcacaacattctcctgcctcagccaaccgagtagctgggactacaggcacctgccaccacacctggctaatttttttatatttttagcagagacagggtttcaccgtgttagccaggatggtctccatctcctgacctcatgatccgcccacctcggcctcccagagtgctgggattacaggcatgagccactgcgcccaaccttggtttctttatttgagacagagtcttgctctgttgcccaggctggagtgcagtggtgcaaacataactcactgcagcctcaaactcctaggctcaagcgatccttctgcctcagcctcccatgtagtcactgcaggcatgcaccccacacccattttgttattttttgtagattaagggtctcattgcccaggctgattttgaactcctgggctgaagcaatcctaccacctcagcctcccacagtgctgggattacaggcgtgagccactgcgcccagccaaaaaatgccgatgttgaatctgagtgatgtgtacacggggttcatgttgtattatttcctttcttggagactgagtctcactcagtcgcccaggctggagtgcagtggcacaatctcggctcactgcaacctcggcaacctccacctcccaggttcaagcgattctcgtgtctcagcctccagattagctgggattacaggcaccaaccaatacatctggctaatttttgtatttttagtagagacaaggtttccccatgttggccaggctggtctcgaactcctgacctcagctgatctgtctgccttggtctcccaaaatgctgggattgcaggtgtgagccatcatgcttggctttttttttctttttctttttcttttaatgccagtttacaaactttaagctattctacttctgtgtacacttgacatttttcataataaaatggatttttttgtttttgacaaagcctgctatcagccttgtactaccaaattttacggttgatttgcctatgtagttaaaatggagttttcaaaagggatgttcgcaatgctcggaaaaagaatgtgaaaacagtgcagaaaagtgacaggagcttccagtagtgcccaagtgtgacaaaacagaaagccacccctccttacacagtcaatggcaggaattttagagattctacatggtctacattgtttctaaaaaataaaaacaaaaaacaaaaaaaaacagggtcttactcccttcacccaggctggagtgtagtggtgagactatgactcactgcagcctcaacttcccaagctcagctgatcctcccaccccagccttctgagtcgctgggagtacaggggcacaccaccatgcctggctaattttcaaacatatttattatatttatttatttatttatttatttatttatttatttattattttattattattttatttttttttacatacagggttttaccatattgcccaggctagtctcaaactcctgggcttaagagatccacctgccttggcctcccaaagtgctgggattacaggcatgtaccatcatgcccggccgtaaggttggggtttttcttttttttttttttaattttgagacggagtttttgctgtgtcacccagactggaatgcaatggcacgatcttggctcactgcaacctcttcctcctgggctcaagcaattctcctgcctcagccttccgagtagctgggattacagggacccgccaccacacctggctaatttttgtatttttagtagagatgaggttgcactatgttggccaggctggtctcgaactcttgacctcaggtgatctacccgcctcagcctcccaaaatggtgggaatacaggcatgagccgccgcgcccggctgtaaggttggggtttctcaaagcgtgggtggtcaagacctatcagtgggttgtaaaatcaatcaagtcagacaagagctacgtttttttaaaaaaaggataggaatggcggaggaacaggctgaagagaacagagtatttcggaaagattcttccagagcatgggaaagccctgctgcattaaacttgattcatatactcaagtgcgagttctctgtcaagaagtcaaatgtgttttctttctttcaggcatgaccagacgaaagcatggcagcctttgtccgggcctcatggagcccgaccgggagtgtgatctagaggctgcgctcgggggcacttccatgctttcgtggcctagaaccccaaggccccctctcggaagtcgccccagcttccccctgtacctgcacgatgctgctgatgaccatggggagaatgttcaggggaaaccggaggatgttgaacaaggccaaagacacgaaggctgtctgggcatccaggatgttgttctcgtcaatggtcacgtagacggcaaatgtgcacaaggccacctgcaagcagaacgcccagtgctgactgctgtgccccgagtgagagtcatcatcctaggagcagtgacaggccctggagacgcgcttgggccctccccaggtggccacaactgaccagctgctggagctcgtggaaaaacctggggcagtatctggcacatggcaggtgctcactaaacactctgggaatgaactggataaatcaacgaccgggagcccaaagagccggcctctcccatcaactttctcagagatgtcctagaggggcattcttagtattcctcaaaagcaccaagcacaatccccaagccaggcctttgcccctgacgtttcctctgcctgaaaccatcttccatccagggggccacctgactcctccctctcaccattcaagggagctgtctctcccactttacccaaatagccctgccatctggccatcggcccatgtattttcagggtctcagcactgccatttcattgttacttcctggaaggtcatacagcttaaaaataaaaaccatacactttgccatatttccgctgtgggaccctggttgagttatttcacctctccaggcaagcccctattttctcatctataaaatggaagtcatgataggcttttaagggctgttggcacttatgtagggtgtttatttgcacagggcccaagcacagtaaaactcaacagatggcagctgtttttatttcttgttggaagatttggtccaaattccttagatcattcttccaaggaatctattaacgtggtcacacaagcgcagagcccggtcccacgggaagccagagctggttcgtgttctggctctgacattaacaagacagatgacgctgagccatggcacagaaattttccaggctccgatgtcaagagggaggcaaggtgctcgaaacgacagggacgcatgatccctgggtgcagtggtgcaatcatggctcaccacagcctcgacctcccgggctcaagcattcctcccacctcagcctcccgagtagctaggactacaggcgcataccaccatgcccggctagtttttttatttttgtagagacagggtctccctatgcttcctaggctgttctcgaacacctgggctcaggccatctgcctgcctcggccacctaaagtgctgggattacagacatgagccactgcacccatcctggctcccatcttctaagcggtaacgcaacactggcatcttacctaaagatactttttttttttttgagacacagtctcattcttttgcacaagatggagtgcagtggtgcgatcgcagttcaccgcaacctctgcctcccaaggtcaaacgattctcatgcctcagtctccaagtagctgggattataggcgcccaccaccatgcccagctaatctttttgtatttttcttagtagagatggggtttcgccatgttggtcaggctggtcttgagctcctggcctcaagtgatccgtctgcctcggcctcccaaaatgctgggattacaggtatgagccaccatgcccagcccagagatattctttactcgaaagggtctacatgtatctacatgatagacttctcaaccataaaaaggagtgaaattcttatacatgctaaaacatggataaaccttgaaaacatcatgctaagaaaccagtcagatggccaggcggggtggctcacacctgaaatcccagcacttcgggaggctgaggcgggcggatcacttgaggtcgggagttccagaccagcctgaccaacatggagaaactccgtctctactaaaaatacacaattagccaggagtggtggtgcatgcctataatcccagctactcagtaggctgaggcaggagaatcgcttgaacctaggaggcaaacgttgtagtgaggcaaggtcatgccattgcgcttcaggtgggcaacaagggagacacttcgtctcaaaaaaaaagaaaacagtcagaaaaggccacctgttgtttgattccatttatatgaaaagtccacagtagataaacagagacagacagaaagcagattactggttgcctggaatggaatggaagatttggggagcaactggtaacaggtacagggcttccttttggggtaatgaaaacgtcctggaattagtggtgattgtcattatcatttatacaaaaaacccactgggtgaccttcacaccaccacacatcacacaaaaaaaccactgaattgcacacttttaaatggtgaattatacctccgttaaaaaaatacatttcgatcggcatggtagcccatgcctgtaatccaaatgctttgcaaggccgaggagggaggatcacttgaggccagaagttcgagcagagccagggcaaaaaagcaaggctgtgtctctacaaaattttttaaaaaataagccaggtggctgggctcaatggctcatgcctgtaatcccagcatgttgggaggccaaggcaggtggatctcctgaagtcaggagttcaagaccagcctgtctgacagggcaaaaccctgtctctactaaaaatacaaaaattagccgggtgtggtggcatgtgcctgtagtcccagctactagggaggctgaagtaggagaatcactttaacccgggaggtggaggttgcagtgagccaagattgcaccactgcaccccagcgtgtgcaacagagcaagactccgtctcaaaacaacaataatattaataaataagtcaagcatagtggcatgcacctgtagtcctagctactagggaggctgaggcaggagaatcatttgagcccaggaggtcgaggctgcagtgagctattactgtgcccccgcaccagcctgggtaacagagtgaggcccccatctctaaacaagtaatttttaaaaaagtacctctccaaagtcaacctatttttcagtgtagaagtcaaagtgctgactcagatcccaaggcccagctgatttgtaaagtcccttccctgtacctcatttggcgtcatctgtcactctcccctcactcccactgtttcagcctccatggttatcccacctatgaatgggcacagtaatgccccagggcctttgcacatgctcttgctactccctggttggcctctttacctccatcaagtctttcctcaagtgtcaccttctcagtgagcttggaccaccctacttaaaactgcaagccgcccttattccaaagatctgactcttttctttctatagcacttaggatggctttctctagcactaggatttatttattgtgcctatttttccttgtctgtttctctccgtgaaaaatgaatgttccatgactggagattattacctgtagtatgcactgctgtattgtcagagcctaggacagagcccagatcatggtgctcagtgaatgtctgctggatagataatggatgggtgggagtggataaatgggtggggacggggtaggtgaatttgcctgagggcagaagagcacatcacaggtgtctcttcagcagtgaagcaaaccaggcctcaggcatctcaccaccaaaacgtaccagcccccttggtgagccaagtaccaatcgatgccggctgctggcagcacagggcacacacagagaggggacaggacaacatcatgcggcccctttcaggtccatggtcctggcttctccagaaggaggaggtcatctagccatccacccctcaggtggtaactgagcacccatcatgcgctggggactgaggtgggcttggcaaccctgagacgcacagtctagtggaagcacaggctttaacaggttccctgcaggcagtgtttggaaatccgaagaggctggtaggacgggcacaatgactggggctccaggcagcaggagactggagttcgccttgtaataggcgagggtctagggtgcaaaagcccttcatacacagtgaggagcacctgtcccctaggtgccttttctgagaaacgtggaaaaccaatgaatggaacccctacactccagcccactccctaaaaatcctgatgccctgtgtgcagttacctgctcttcctgcctacctggcatctattactctgtttatggcaacatgcaattttctctgggggaactgaacttctcccagtgtcaacctatgagcttcagccacagatgaacctcctccctcaccccctaccttggccccaagccctgaaagacatgacctagccctggctgacccaagcatcctatctccctggcctcagtgactggctcaggaagaagcatgtgatcgaccacaaccaatgagactcaatcccatagctttgcaggaaatattaggggaaaagagtaagactctctgttcacaggggttgctgaggtgacaggatgatcaggaaactaccagctaataaagaaaccaccatcaagaaagcagagctgagagtcagagacgttgttattcccaacattatcttgggaactcctagatccagccatgcctggaaccccattcatgcttaaaagtctttttctagactttttagttttgtgactcaaaaatccccctcttctcttactctagttgatttaagctaggtttctgttatttgcaagacagttcctaattaatatgatttatttcaacctctcattcattcatgtatttattcatttacctacatacatttacagagcatgaactatttgccaaggtccctatgctttgctggtacaagcacaaaatgacaaggtctgactgggcatggtagctcacacctgcaatcccagcactttgggaggccgaggtgggcggatcacttgaggtcaggagtttgagaccagcctggccaacatggtgaaaccccatctctactaaaaagacaaaaaattagccaggtgtggtggcgcacacctgtaatcccagctcttcgggaggctgaggcaggagaatcagctgaacctgggaggtggaggttgcagtgagctgtgattgtgccactgcactccagcctgggcggcagaatgagactccgtctcaaaaatacagaaatgtataaatatataaataaataaaatgacatggtcgtggcagtgtctccatgggccctaggatatgatcagcagagaactacaggacagatcattaccatagagaatgatgaattattctaacaaagggagattcagggtaaacagaaggcaagaagctcacaaatcatccaagacagaaaatgttaaatattgacggctgcctggcgatgctattttaggaaagtgcattaggtggacgtggtaaatgccaggtttgccattccagaaaaacagtcccatcagtccctggatggcatccctggccttccccggcctctgtgttccatcacacctaccgctgggtaaacacctcatcgtctttgaagcacaggaatgcacaccagtggaaaaaacactcaggcaccttccaggggaactaaaggccacatattttatcctaatgtagtcagaggcttcgatgcctcggccaggacaaggtctccccagctgacacccaggcccatctgtttcttgccaaacagctcaacaaactctgtctctggaaactccgggaaactaaatggcaagaaagctcaagaaaaggttaagtaaagccggtagccgggctcagtatttcacatctgtaatcccagctactccagaggctgaagcaggaggatcgctttagctcaggagttggaggttgcagtgagctgtgatcaagccactgtactccagcctggacagcaaaacaagaccctgtctctttaaaaaagaaagaaagaaagaaaaaagagaagaaaagccagtcctgctcttaagcatcttctgctgtggtttcctaatggggaacagggcaggaagtgataagcaaagtttggtgacagcctggaaactgtgggttttgccaacgaatccaatgtgcagagcaaaaagctgtgagaacacgctgcccatcccctcctaagcgggacacaaggcacagaccaaacctcatcaccagcgccctctggcttgtatcttttcctctgagacaagacctttcaaaatgccatcaaggccaggtgcagtggctcatacctacaatcccagcactttgggagacagaggcaggcggactgctcgagctcaggagtttgaaaacatcctgggcaacaaagtgagaccctgtctctgcaaaattacagaaattagctgggcatggtggtgcatgcttgtagtcccagctgcctgggaggctgaggttggaggattacttgagcctgggaggcagaggttgcagtgagccaagatcatgtcactgcactccagcttgggcggcagtgtgagaccccatctcaaaaaaaaaaaaaaaaaaagaaaaaaagaaaaaaaaagccattttgtatgtatttatgtatgactcttactatcacttgtataaaagtaaagtaaacagaatcaagtaaccataactacatgtatgacatgtatccaccattacagtgatacagacgtggactctggaaaaacacacaagaaacatggagagagggaagcaaggtgactggtgttaggaggaagggcttgggcctttcactattgactgtggttctcaactgggagaattctgtcccccaaggggacacttcgcaatgcctggagccattttctattgtcaccactgggaagaagagggagaggtacgacttagcatctggcaggtagaggccacagatgctgggaaacatcctgcaatgtgcagtccaggccctacaacacagggacaaaggatgacctgttggcgaatgtcagcaggctgaggtggccacgtgcgaagtccggctgtatgaataccatctggtgcagctttaattatgtttcaccatatgcaaatacattacttcctactttataaagtaagacccaccgggcatggcggctcacacctgtaatcccagcactttaggaggccgaggtgggtggaccactagaggccaggagtttgagaccagcctggccaacacggctaaaccccatctctactaaaaatacaaaaaattggcttggcatggtggcgtgcgcctgtactcccagctactcggacgctgaggcaggagaattgcttgaaccctggtgaaaccccgtctctactaaaaatacaaaacttagctgggcatggtagtaggcgcctgtaatcccagctactcaggaggctgaggcaggagaatcgcttgaacccaagaggcagagattgcagtgagctgagatcgtgccaatgcactccagcctggcgagagagcaagactccttctcaaaaaaaaaggagagtccaggcgcggtggctcacgcttgtaatcccagcacgttgggagatcaaggcaggtagatcacttgaggtcaggagttcgagaccagcctggcgaacatgacaaaaacccatctctactaaaaatattaaaattaacaaggcatggtagtgcatgtttgtaatcccagctagtcgggggactgaggcaggagaattgcttgaactgggagatggaggttgcagtgagctgagatggcaccactgcacttcagcctgggtgacagagtgagactcagtcccaaaaaaaacaaaaaaagagagagttcatcaacgcaccccggtaaagtcaaggtattggagtgtaagaagaatgcaatgtacaaggcagaatgcaggggcattggagctggaagtgatcttagggaacatggagttacagaagggcaacaagatgtcatttcttgctcaactctaggccactggcaccagtcacctggagggctgcttgaacataactcagtgggaaagaaccccatgagtgactgtgggtgtctgctgtgggcatgaggaaggaggacagggcccagtatttgacatgcttggaatctaaccccttcattttccatgtgacaaaatctagagccagcgaggtgagatgaccagctttggggtcacactgtgagctggcagtagaatgtggcaggtgtcctgattctcagaagaacattccagtcctctaagccaggggctggccaacaaggatggctcaggtccacatttggcccacacctgtttacatacggcccatgagctcagcattgatttcattttttttattttttttgagacagagtcttgttctgttgcccaggcttagagtgcagtggcgtgacctcagctcgctgcgatctccgcctcccgggttcaaacgattcccgtacctcagcctcccaaaaagcttggatgaccagcatgctccaccacacctggctaatttttttttgtggggggctgggagggggtgggggggcagcagcaggaaagggtctcactctgttgcccagccaggagtgtgtggcatgatcttggctcactgcaacttctgcctcctgggttgaagcgatcctcctgcctcagcctcccgagtagctatgaccacaggtgcgcaccaccacttccagctaatttttgtatttttagtatagacggggtttcaccacgttggctaggctggtctcaatctgctagcctcaagcaacccgcccgcctcggcctcccaaagtgctgagattacaggcatgagcccctgcgcccagccagatttcatattttttaaaagttaaaaaaatcaaaacaatattacatgacacatgcaaattctataaaattcaaattttggtgtctctaaatacttttttacaggaacacagccacacccatcgatttccatattatctaaggctgtttttgcactacgctggaagagactggtatttgtgacagagactgtatggcccggaattccgaaagtatttacagaaaaagtttctttactcctactttctgccagtctctctcgaaatttaatgtgcatacacaccacctagagaactagttacaactcagattccgtttcagtggatctgggctgaggcctgaaattctgcaccgttaacaagcaccaggtgatgccatggctgctggtccacggaccagactttaggcagtgaggatccactccggtgtctctacatgtcaacctgaaccagaagcagcagcacctagggatatgttaggaaagcaaatactcaggccccaaccagacctactaaaactgaaaatttgggtggggcccagaaagctgagttttatagtaacaagctaacagccagcactgtggctcatgcctgtaatcccagcactttcggaggccaaggcgggtagatctcctgaggtcaggagttcgagaccagcctggccaacatggtgaaacaccatctctacactaaagatattttaaaaattagctgagcatggttgctgcatgcctgtaatcccagctactcagaggctgaggtggaagaatcgcttgaacccgggaggcagagattgcagtgagccaagatagtgccatagcaatccaacctgggtgacagactgggacttcatctcaataaatgaataaataataaaatataataacaagctctccaggtgattctgatgcaggcttgaatttgaacaccatctctcctgcagttccagaccctgagagaagtaaggcaagactaagaaaattcagtgggagcatgaacacgctttcgcaaatgctgaaacagctggagcttccttagacattccacctgaaactcaacaaagatgaagcagatggtagtttaacagaaaagttcatattcataaacatgtttaactctgcttcacagaaacttgccagaaaaacatataatttgccaacctgaccaagaaggaatagttgtaatgagcacaacattacaaaaagaatgacacagttaataaaaagacagaaagaaaaaacaaacatggggcatgatctgaagtcatccttcaccattaactgtttttaactgtgcttaaaaagggaatttccaaagtccatctctgtatggtctcctgatttgcggccaactttgcaaattgtaagttgcactgttgtctttaaacttttcaaagccagctaggcagggatagacccattaccataccccaggacaggtaccagaactttcagtgtagcatggatcataacagcaaaaaaaacagggaacaacctgtttttgcaaggaatgggagaaagggtaattccagcagggcgcatctgcacgtcagacaagcatccatcatgaacacaaatgaaacaagctgggagtggtagcagtgcacctggagtcccagctacttaggaaactaaagcaggaggattgcttgggcccaggagttcaaggctgcagtgagctatgatcgcaccacagtactccagcctgggggacagagcgagaccccatttcaaaacaaaaccccccaaaaaactaaaatgaagtagaccagaatgaacgaaccaagactatatattgttaaccaaagaaaagagaacactatgtacagtatgattccatttatatctgtcaaagtatttttaaatacctatatgcttgtccatttttctctaaaagcgtacacgaaactgtcactttagaagggaggaactgatggaagagaggacaatatacttttcattttatatctttctgtatttttttttttttacaatggatgacaatatttgttcagcacctgctatgcactgttttatatactgaggatacagcagtcaagagaaacgacaaaaatgcccatctggagctgacatcctagtgggggaaaagcagacaataaaataagtacattttattttacttatttttttttttttttacttttttgagacagggtcttgctgtgttgcccaggctggagtgccgtggctcgatctcggctcactgcaacctcagcctcccaggttcaagggattctcatgtctcggcctcctgagtagctgggaatataggcatgcaccaccatgcccagctttttttttctttcttttttttttttttttttaagcagtaacagggtttcaccaggttggccaggctggtctcgagctcctggcctcaagtgatctacccaccttggactcccaaagggctggattacaggcacaagccacgggacccagccaaaatagtaatttaga

SEQ ID NO: 664 - DNA, 183610 bp, Homo sapiens
  misc_feature (1)..(183610): n=a, c, g or t
tcttactgtctcggtatttgagcagtagcccctaaatgccatagcaacaagtggggtccacatgtagcaaactcctactcattcctcaaaaccccatccccagcacttccttgtcagaagccttttctggcccctcgagcagaatccccagctcttaccttctcggtatttgagcagcagctcccaaataccgcggcgggaagcaggatccacgccagccgtaggctcgtccaggataacaacttgggagccgcccacaaaggcaatggccacggacagcttccgttgcatcccacctggtagagatggggaagggacctcagtgtgtcacacccagccttgggcaaggttgcctacccacgtggacctcagtacccggcttccccctgccttcaggatgaatccccaggcccctccctgtgaggtgacctcccttggggatgggctcaccagagaaggtggcgagtctgcacactctgcttggagaccagccccacatcctgcagcagacggtcctgctcggggcccactacagcggcactcagacccttcagccgcccatagaaccagacgtgctcgtccacggtcagcctgcggccagtgcacagagcagagtgacccacatggcaggcagagtcccagagggcgtccagtcccttcccaccgctgcactctgggcctgccgaaacgcacatgtcaaacagcacgttgtactgaggacagacgcccaggtggggccggatggcgccatgctggagcggagtgtggcaggatgaagcagagcacatgggtgggaagagcactcaagaatggactgtgaatagaggggttcagagtagccccttacagagtgcatggcagtacagagtttattttaatttctgtttttaaaaaattttaattattattattattattatatatatatattattattttgagacggagttttcattggtttgccaggtggagtgacggcagtttggtcatgcaagtccctccggtacgcattctgctagctccgatagtcagtannnnnnnnnnnnnnnnnnnnnnnnnnnnnnnnnnnnnnnnnnnnnnnnnnnnnnnnnnnnnnnnnnnnnnnnnnnnnnnnnnnnnnnnnnnnnnnnnnnntggtacattgctaccctacaggcagctaccattgctaacatcttacattcttccagatatattccaaatacgacctattttgttgccacaaaaggcactacgatactccattctataccttgcttttttttacttagctatattaaaaactgaacttttttttttttttttgagacaaggtctcactctgttgcccaggctggaatgcagtggtgcaatcatagctcactgcagcctcaacctctcaggctccagcaatcctcccacctcagcctcctgagcagctaggaccacaggcacacaccaccatgcccagcntattttgtatttttagtagaaatggggttttgccatgttgctcaggctggtctcaaagtcctgagctcaagcgatccactcgccttggccacccaaagtgctgggatcacaggtgtgaaccaccgcacacagcctttggaaactatctttatcagtaacatagatgtgttttattcttgatatttcttttgaacaaagaggtacaagggacaagtcttctcattccattccctatggccctcccctcagttcctctctctagaggcaatgatcatgggttgcttatgtcttctttcagaaaatattttatacaaaaataaagtaaatatacatcttctgttatcaaatcgaaggaagcatacgttacataatgttccgtactttgcttttttctcttaaccacagattttaaagatcatcccgcagtatacatgaacagtttcctcactctttgttacggctgctttgtattctattgtagggatgaacttgacttccatcggtctcctggggacttggcattggtgttcctcttacaaacaatgcagcattgaataaacaattgaatttcacactcaagcaagagtgttgataagatcactttctctgccaggtgtggtggctcccatctgtaactccagcattttgggaggcccaggtgggaggatcccatgagcccaggagtttgaaaccaccctgggcaacataatgagactctgtctcacatatatataaactttcaaaaaaggaacctgccaggtcaaagggtgcctacagtaacatttagacagacactgccctccaaatagggaacatcaattcatactccagctgataaggtacaaaggcaattacttcacaaagcacagcagataacaagtttccgacctctgccaatctgaagtgaaaaatatctctgtgtagtttaagttccttttctctttatcatgagtaaactgaggtctttccatatggatttaaaagcaatcacgttttcctgctcagaggaagattcatagacttagatatttgcattaataaatagggcagatctaatggccttctctcttctgctgggaaacaacttcccatggctccctattggcttttaagaaccaaccctggctgggcgcggtggctcacgcttgtaatcccagcactttgggaggccgaggtgggtggatcacgaggtcagcagatcgagaccacagtgaaaccccgtctctactaaaaatacaaaaaattagccgggcgtggtggcgggcgcctgtagtcccagctacttggagaggctgaggcaggagaatggcgtgcacccgggaggcagagcttggcagtgagccgagatcgcgccactgcactccagcctgggcgacaaagcgagactccatctcaaaacataaaaaataaaaaaaaataaccaacccttgcagtgatccatgaggccttccttctacattcaagtcccatctacttctcctacaatttctcccaccctgttccccaaatgtgccttactcaggcatttacttaaagaagtatttaccaagcttgttgtcagatcatgttctagacactgttgcaggcactggcagattctgaaaggctgtggttcctgccttcaaggattacccaactgctggtccacataaatggtttcttcagtcacctcttggtagaatcccctcttctccaggctttctgtcctaagaaatgctatttttccttannnnnnnnnnnnnnnnnnnnnnnnnnnnnnnnnnnnnnnnnnnnnnnnnnnnnnnnnnnnnnnnnnnnnnnnnnnnnnnnnnnnnnnnnnnnnnnnnnnnctgatgctgctgtcactctaaggatcccgggtggattgataattggtggatggatgatggatgggttcatggttgggtgataaatatatccatgggtatacatatggatgtgtacatagattattctctggctatgatagggaggactggctgtggtggggaacatgactgtggtggggagcactggctgtacggggagactcatagacaagggagagggcttgggaagggccaaagttggaaagacttaggaagcagttgcatagtcctggcaaggaataatttggggctaggatcaggtcaattaaatgtttaacattggaatctatgtctcttgtatacataactgcatatgtcaagtcttggtatcgttttcttttctagcagggcacattcctttggaatgagcttttactggcaactgctcagaagctgttctgtatataatgaccaccaacagttgaatccttttttcagccatcacctcaggaattaacagtagtatgaaatcgaatgtaaaataatcagtctttgagatgtcatgccttctccacgatcaacttcttctttacaaggctgtgttccaaatacgccaggccaaaaagacgtgaactttgtcctttttagggtttgtgtcttgatgtttcctggctaaatctctttgtatgtgttggccttgtaaggtttacttttttttttttttttttttgagatggagactgtgttgcccaggctggagtgcagtggtgcagtctcagctcactgcaacctttgcctcccgggttcaggtgattctcctgcctgagcctccctactagctgggattacagacgtgcactaccctgcccggctaatttttatgtttttagtaaaatataaaaattatgtttttatggggggttcttgccatgttggccgggcttgtctcagactcctgactgcctgcctaggcctcccaaagtgctgggattacaggcatgagccaccgcgcccaacctaataactagatctctttaattattggaacatgtatattttgatcagattgacacttttttttttaagtgaagtgatcttatttccctcatttctcatttttaacttttttttttttttgatatggctttaaagctctgtggagctgtaagggtctgggttccttgacactccatgggggtctcaggtgatcgtgggagggctgttggaatcagagctatttggagggtgcataggccagtaggatgggaaggctgtgggagaagtgggctttttggggaccgcagccaaatggacaactgggcctaatctaaagattggcccctcccagctcctactgatggtcatgtaacaggaatggggcccagcaccaccagattttctgatttttttttttttttttgagacacagtcttgctctgttgccaggctggagtgcagtggcatgatattggctcactgcaacctccgcctcctgggttcaagtgattcccctgcctcagcctcccaagtagctgagactacaggcatgcgccaccatgcctggctagttttttgtactttagtagagatgaggttttaccatgttggccaggatggtcttgatctcctgacctcgtgatcctcctgcctcggcctcccaaagtgctgggatgacaggcgtgaatctggcctgtattcactcggcttttttcctcttttgctaacatttgttttatacattagagctatatttggttatactactaactacttactaggtatagcatagctataatattaatatttctagaatcatttgagaataggataaggcacctatgaaacatatatccacccgtaaagggctactacagtaaaatacttggtatagaatagaataggtattagtacgtaggaggggctatatactattaggtagcaagtagtcgtccccgggaagtataggcagctaagagatgagctagtagagctagagctactatagagtagtatacaggcaccggggagcataggtagaccagacaacagtacctagtataggaggtaagtaggggcgtatcagctagatataacagaccatacacgtagccggcctaggatatccagctacaccataccgaggactatagtaccttaattccagtaggataatagtagccattgtacctaagactagttggctagattcataaatgaaagctaggctaggttacttcctaatatcctaggggctagagcttgtatcgtgcagccctagggnnnnnnnnnnnnnnnnnnnnnnnnnnnnnnnnnnnnnnnnnnnnnnnnnnnnnnnnnnnnnnnnnnnnnnnnnnnnnnnnnnnnnnnnnnnnnnnnnnnngttattccaaaagcacacactccaggtcaggcgtggtggctcacgcctgtaatcccaacactttgggaggccgaggtgggtggatcacgaagtcaagtgatcgacaccatcctggccaacgtagtgaaaccccgtctctactaaaaatacaaaaattagctgggcatggtggcgcgtgcctgtggtcccagctactggggaggctgaggcaggagaatcgcttgaacataggaggtagaagttacagtgagcctagatcgtgccactgcactccagcctggtgacagagcgagactccgcctcaagcaacagcaaaaaagaaaaaacaaaaaagtgcacactccgtcaaaattcctagcagcagcacacagcagccaatgtaaacgacttccccaggcagagcagcaactgatgggacaaaggtaacgcgaggacaagcctagggtcccccaggggaacagtcacttctgcaaacaccgttcccggctcggcttccatcccagcctggcaaaatttggagccgcctgtcttgctgtttcctgctgatggggccagcctggcatcggcccacagctcctgcccttggaggtcccatggagccccttggagcaacacagacaaatcaggccctggggaaaggaggtgctagaaaaaaggctggggctgatttagtgaggatttggtggggtaggaaagtcaccaagggagaagctaggtgcatgtggtacccagcccctggttcccatggcaacgcatgacttctacacaagccagagggacccagcatctctccctccgggtccactgaaggaagatgaggaaggagactgccacttacctcttttaaggctgtcataattttggatctcaggatggctagggcacacactagggctaccagccagaaagtgagcatgatccctgaagactgaactcccttcctcctctccagctgaattaaaaaggtagcaagcagctgaggagagaagcacaagacaggagttgttgggtttttttttgagacagagtttcactcttgtcacccaggctggagcgcagtggtgcaatctcagctcacttgcaacctccgcctcccaggttcaagtgattctcctgcctcagcttcccaagtagctgggactacaggtgcccgccaccatgcctagctaatttttgtatttttagtaaagacggggtttcaccacgttggccaggctggtctcaaactcctgacctcaggtgatccacttgccttggcctcccaaggtgctgggattacaggtgtgagccactgctcccagccacactatttcttaatggaccacgtaataaatattttggacttcatgggccatagactacatcaaaactactcagctttgccactgcagtgtgaaagtggccatagacaagatgttaatgaatggacatgccttcatgccaataaaactttatttaaaagaacaggcagagaacccagtacagaaaacaaaacccacttgccctgatgctcaacgttcccggggtcagcctctgccccatcgcccctgctctctgcctcggccatctctgctccagccacacacaactctcaagttttccctgtgaccctcaggactttacatgtgcttttctccgcagctggtcctctgccctcagccccttaagctttttaacaacttgctcattctcaggcttcacctccaccatccctccctcagagaagcctggctatgccccagaccaaaccaagctcccctgccttcaccctcacacagcactctgcagacgttcaaacactttgtgccttttgaggaatcatttgtttaatgtctgtttgcacagctagactatatggttgtgtctccaacgcttgatacagagtagggataaaaaaaaaaaaatcagccaggtgcagtggctcatgcctgtaatcccagcactttgggaggccaaggcgggcaggtcaggagtttgagaccagcctggccaacatggtgaaaccctatctctactaaaaatacaaaaattagccaggcgtggtggcatactgcctttagtcacagctagctgggaagctgaggcaggagaatcacttgaacctgggaggcggaggctacactgagctgagatcatgccactgcattccagcctgggcgacagagtgagacgctatctcaaagaaaaaaaaaaaaaaacatgtgctggctgcatcctgtcccatattaccagtgcctgcatatcctggttccctgggatatagtcagaatgtttctgacacattcacagctgagctggtggtcctccattccatcccagagatctcaggtagataaagagaggctgaggatctcacaggccagttcacctcttggccagcccagctcagagtcccctgaggagtcaaaagccccaaccctcagactatcacccctgtgtttcccccagggtgacagaggcataaatgaacgatcaaaagaccaggaacggccaggcacagttgctcacgcctgtaataccagcactttgggaggccaaggcacgtggatcacctgaggccaggagtttgagaccagcctggccaacatggtgaaaccccatctctactaaaaatacaaaaattagccaggtgtggtggcgcgtgcctgtaatcccagttattggggaagctgaggcaggagaatcacttgaacccgggaggcagaggttgcagtgagccaagatcatgccattgcgcctgggaaaaaagagcgaaactctgcctcataggaaaaaaaaaaaagaccaggaacaaggaatgttaagggaggatgacctactcaagtcaaaaacagctgaccacgtatggtggctcatgcctgtaatcccaccactttagaggccaaggcagagggatcacttgggctcgggagtttaagactagcctgggcaacatggaaagaccctgtctctattatagtgaaattgaaaaaaaaaaaaaaaaatccactctaataccccactgccagaacacagagcccaagacccgaattcaggacaaagcaaagccctttactctctcattccctccatgcatttatggaacgcttactgcatgccaggcacagggccaggctctgaggacacaaaggggaatcaaacccagcaggagagccaggcgtaaagcaggtgccaggctacacgctggggcctagactggaagctggctctaccacttactgaccaggtgaccttgggccagtccttctcctctctgtaccacactttgcttaccttatttacaacgtaaaagggttaataaagggattaggacagttcttggcagagagtggacagcacatatgtgtgctatatagaatcatggtctgggcagggcatggtggctcacacctataatcctagcactttaggaggcccagacaggaggatcacttgagacaaggagtttgaggccagcctgggcaacatagggagaccctgtctctacaaaaataacaaactggccgggggtggtggctcatgcctgtaatcccagcactttggggggcctaggtgggtggatcacctgaggtccggagttcgagaccagcctggccaacatggtgaaatcccatctctactaaaaatacaaaatcagccgggcgtggtggcgcatgcctgtaatcccagcctctcgggaggctgaggcaggagaatcgcttgaatccaggaggcagaggttgcggcaactcaagatcacaccattacatttcagcctgggcaacaaagcgaaactccatctcggggggaaaaataaaaaaataaataaataaaaaataaatgtagatgggcatgttggtgcatgcctacactcccagctacttgggaggctgaggcagaaggatcatttgagcccaggagttcaagcctgcagtgagctgtgatctcacgccagtgaaatccaacctgtgcaacagattttactctgactccttattttacattcaaatttttttcaacataaaannnnnnnnnnnnnnnnnnnnnnnnnnnnnnnnnnnnnnnnnnnnnnnnnnnnnnnnnnnnnnnnnnnnnnnnnnnnnnnnnnnnnnnnnnnnnnnnnnnntttttcatactttttctaggccacaggtatattattaacagattaaccattattttttttttcagctatagccaataataataaaaaagagcaactcacattgatggtgcccttattgtgtgtgtgtcgtttcatggcatcctgaagacagctgagagacagatgtgatcatgcctgttttacagatggaaactgaggtttggagggttgaagttgcttctgagtaaatggctgagctcagtgcaacttgaccccagttctgctccactcacccaacgttgctcagccgttttcggttgtttcagtttcactgcagacacttctctgttctccccctgccctccttctctcccccaaactctctctcttccttctcctcctttctcttcttctgctccccaatccccctcctcctctttcatcttcttcctcctcctccttcctcgctcccagccctcctcctcctcctcaacctcctcccttctatctcctccccctcctcctctttcttctccctcgccctcctctcttcttttctctcccccaaccccctctctactgggcctttgcatgtgcccatcccccagcctggaaacttcctcctgttctggttaatttctgctcattctccaggtctcagtctacctttttgttgtcgttgttgttgttgttgagacggagtctcgttctgttgcccaggctggagtgcagtggtgcgatctcggctcaccgcaagccccgcctcccaggttcacgccattctcctgcctcagcctcccgagtagctgggactacaggtgtgcgccactgcacctggctaatttttcgtatttttagtagagatgcggtttcaccatgttggccaggctggtctcaaactcctgggctcaagcgatccacttgcctcagcctcccaaagtgctgggattacaggcatgagccaccgtgcctggtctccaggtctgtttaaatgtcatttcttcctaaagctttcctggctaattcgattcttcttctcaaatgtatcttggggggtgaaaggtctgagaagagggaggggcatagagataaaggaagcttccaacagaggtgcatcaccaatgcccttctcccaggtccgaggtcatacccctggctcgaggggaggcggcttccgatgcctggtccatgctggggtatcaagttccagccctctcaccccagtttgggacaattctgtaggaccgcctcactggcagagcttgctgagggagtaagctgaggcctttgtaggccacaaggttgagaccagcctgagcatcatagtagggccttgtttctatgaaaacatttttttaaaaaatgaaacttcccacatgacaattttttttttgagacggagtctcactctgtcacccaggctggagtgcaatggtgcgatctcagctcactgccacttccgcctcccaggttcaagtgattctcatctcagcctctcaagtagctgagattacaggtgcccaccacacctggctaatttttatatattttagtagagatggggtctcgccatgttggccaggctggtcttgaactcctgacttcaagtgatccgctcatctctgcctcccaaagtgctgggattacagccatgagccacagcgcccggcttccccatgacaattttaaacatgagaactatgtatatgccacagtctggaacttgggatctcaaataatcttggattccttgttctcagtccccatacagaagggaggagggctggcctttggactcccccaaatctgggttcgaatcccagctccaccactgcaagtctggttgctctggatcagttacttaacgttctctaaatgtcagttacatccgtgagataagctacctcgcgggacttcattcagtccttcttcaaatatctgtagaatatttgtaggctgaggcctttgctgggaccgtggagaagcccaacttcctcctccctttcccccacttcctaggctttgatccagccctggagccttgatcgaattgatctctctttcaagtcttccagggaggctgtgactcaatcctagaaaccaggggcaggtccaggctgcctgtggtctacttgctccacttcctcaggtgctcaagggtgactcatcactcagtaagttcagagcagagggcgttctcctcaatgtgtgccaggagcacagcaggaatgtaggcaccctcagagctccccagaattccctaaccctggaccacactgtggcattgcagcctatgtggggctgaggctctgtttcacattgggtgcccaatggactgctttacaggacagatgccttgttatcctgctctgctccggtagaacaaatatttgtagaaggaccgaatgaagtcctgcaaggtagcttatctcacagacgaaactgatgtttagagaacattaaataactggcccagagcaaccagacttaaagtggtggagctgggattcaaacccagatttgggggagtccaaaggccagccctcctcccttctgtatggggactgagaacacggaatccatgaccatttgagatcccaagttccagactgtggcatgtacatagttctcatgattaaaattgtcacgtgagaagtttcattaaaattttttttttttttttttttttttgtagagacaaggtctcactatgttgtccaggctggtctcaagctcctgacctcaagcgatcctcctgcctcagcctaccaaattgttgggattgtaggtgtgaaccactgcactctgcccagaggtttcaaagtgaactttttttctttaatcaagatggggtctcactatgttgcccagactggtctcaaactcctgagctcaagcgatcctcccgccttggcatcccaaattgctgggcttacaggcatgagccactgcacctggcctcaaagtggaatgtttttagtggggggaaggtgctggatattactgtcagtcctttagaggaagtaaaataaatcctacaggtacattgacattctcaggtcactttcagagggatgagcaataaattcattcaatgccttctttactaaaagcattagagataaagaaattctggaagtaaatcttgctgaaatgcattttgtcaggggaactcagttgaacaaaaactaaaggttgagttcagaaaaggtaaatgtcttttaccaagatttagttcttttcttccaggtagatatgccttttcttaggatctggagtgagaggctgttggaaaataagggttggggaaagccacagatggaattttacaaattggagacagctacttaatagaaacggcatctcatcagacaagtcaaggcaactgttgaaaatatgacatgtctctctatcagccattcatggcccaggacactatggcaaccaaatccaaactgctggttcaaagagattagtctgaatcccaaaagaatcctaattctctcctgatttattaaggaagaaaacaacaaccgcctttatttgcaatattattgcattgcatgcaatcctaggaaaaggtgtggctgttatttttgaagaagtactcaccctatactagatacagtatgaaacattattcatgcgtcattgcatttatttctcacgtgatctcaagaggtagatgctactgtcatcctgattttaagatgaagaaagcaagccttagggagttaaagggaactgcccaaggtcaaacagctggaaagagacttggccagacgcaaaaacagtctgatgcccggttcaaggtcctttagtttcatctgtccagtaagtagacagagtatttgatacttgggctggactagacaaatctatgatgtgtaattgttctgtgaactcacagatcctagcgtgaagagttttttgttttgttttgttttggtttttttagatgcagtttcgctcttcttgcctacgctggagtgcaatggcgtgatcttggctcactgcaacctccaccttccgggtacaagtgattctcctgcctcagcctcctgagtagctgggactacaggcacccaccaccacgcccggctaattttttgtatttttagtaaagatggggtttcactatgttggccaggctggtctcaaactcctgacctcaagtgatccacccgcctcagcctctcaaattgctgggattacaggcgtgagccactgtgcccggcctttttttttttttttctttagatacgggtcttgctctgtcgccctggctagagtgcagtggtacaatcatagctcactgtagccttgaattcctgggctcaagcgattctcccacctcaacctccctgagtggctgggactacaggtgcgtaccattacaacacctggctaatttttttttattttttaatattttgtagagacaaattcttgttatgttacccaaggtggtattgaactcctggcctcaagtgatcctcccaccttgtcctcccaaagttctgagattacaggtgtgagccactgtgcttaaccaagtgaagacttttttggctagctcaaccctgtaattccagcactttgggaggccgaggtgggtggatcacctgtaggtcaggagttctaactacctagctacgtgccatacatggcaaaaccctgtctctactaaaaatacaaaaattagctgggcatggtggtgggcgcctgtagtccgagctactcaggaggctgaggcaggagaattgctggaacctgggaggcggaggctgcagtgagccgagatcacaccactgcactccagcctggacgacagagcaagactctgtctcaaaaaaaaccccaaaaacaaaaaacaaaaatcaaaacaaacaaaaagcccaaaggaggactttttcatgctgataaagaatgtaggataaacctgataccctctccaaaatctcttccaattttcctaacctctgtatcaatgaggacttcctttcctttctgacttttgatcaatgtaacaaaaataaaattgaagcagagaagggttaagtatgttgctcaaggtcttgcaggtgatttgggttagagccaatcttgaactcagccaggtgaggtggcacctggttccatgactggaccctccctgctgccctggtttgcgagaagattcttacacacatgtccctgatctccttgaagctttgattttccacctagagccccactgcagcatcctggttatctgcgcaagctctgttgttacactgaactggatggtgaatcctgggtacctgtgtggccttgggcaaaaaaaaaaaaaaaaaaaaaaagcacctctctgagcttccatttctttcattctttctttccctttcccctctcctcccctcccctcccctccccttctctctctctctctctctctctctctctttctttgttggagtctccgtctgttgtgcaggctggagtgcagtggcgcaatcttggcttgctacaacctctgcctcctggcttcaagcaattctcctgccttggcccccctgacgagctgggattacaggcatgcaccaccatgccagctaatgtttgtatttttgtagagatggggttttgccatgttggccaggctggtctcaaacttctgacctcaagtattacgcccattttggcctcccaaagtgctgggattacaggtgtgagccaccacacacgttcttgggcctccatttctacagctattaaaaggaggccataatagtacctaactcctgggatattatcgtggctaaaatgagctaatgggccaggtgcggtggctcacatctgtaatcccagtactttcggaggccgagcgggtggattacctgaggtcaggagttcgagatcagcctggccaacatggcggaaagcccgtctctaactagaaatacaaaaattagccagtgtcgtggcttgcaactgttagtcccaactaccccgggaaatcctgcggcccacaacattcgctttgaaccccacgagttccaagttcaacacacaccgacaattgttccccnnnnnnnnnnnnnnnnnnnnnnnnnnnnnnnnnnnnnnnnnnnnnnnnnnnnnnnnnnnnnnnnnnnnnnnnnnnnnnnnnnnnnnnnnnnnnnnnnnnnagagattgccaagtgatccgagatcgcgtgaaccctgagaattctagagattgcagtgagctgagatcatgccactgcattccagtctggtgtgacaaaagcaagactctgtcaagaaaaatcaagaatgaaataaacaagccggaaatcaaattttaaactgttgggatctaatctaatttttttaaaaacaaaaagtatgcctaaacaacagcaataacaacaagccatctatgggccaaactgtgggtggggaaacctattttgtacttcttattttatccgattgaattgtggtggagataggaaattgagaccccaaaaagggtagtaagttttcccaaagttatttagtcagttgccagattatggcttgaattaaatttaaattcttcagctgggcatggtggtgcacacctgtagtatagctgcttgggaggcagaggtgggaggactgcttgagcccaaaagttcaaggcacaggaagctgtgatcttaccaccacacttcagcctgggcaacagagcaagacctcatttcaaaaaaagaaaaaaaaaagaaaaatttaaattcttcattacagaacagctgatggtggaggtttattcttgggcaggtacatctgatctatttatgtatgtatctatgaatttgtctatttggcatggctctttagcaaaatacaggctttttttttttaagtaaaagtaattgaaacaaaatttgtttccaaggctggacagctcagtggcaaaatgcagacttgaacaacattgcccgagtttgaattcagctccagagcttaccagctgtgtgatactggacacagtatttaacccttctgtgcctgagtttcacatctgaaaaaggagatgataaaaataattacagaatgaaaggagataatacacatgaggtacttagaataaagcctggcatacagaactgcagtttggttgttatccgtggtggtggcggtggcggtggcggtggcggtggcggtgatggtggtggtgatggtggcgatggtgatgatgatggtggtgatggtgttggcagtgatattggtggtggtgatggtcatagtggggaaggtgatgatgatgaatgaagatgattagaaagtcctcagttcacaaggtcagagtgatctagatgacacagggctcttcggttataagagaatatccttcagggttcctttaaatggctctctccatctttcgtactacagtgggacttgccacaggttctggggactgttaatgtgagatgagatgctacatacctttttgttgttggtgggtttttttgtgtgtatgcactgttgtgtgtgtgtgtgtgtgtgtgtgtgtgtgagagacagggtctcgctctgttgcccagggtgtagtacagtggcatgatctcagctcgttgcaacttccgccttccaggctcaggcactcctcccacttcagccgcctgagtggctgggaataacaggcacgctccatgctcagccactttttgtgtttttcatagaggcagcatctcactatcttgcctaggctggtctcgaactcccagcctaaagtggtctgcccacttggcctcccaaagtgctgggattacaggcatgagccactgcacctgacctgtatgctcctgttaagagagctttatttttatttatttattttgagacagggtctctgttgctcaggtgggagtgcagaagacaccacatacctttatcccttgttcctcatttcttagtctttctggctactgatctttttagtttgcgtgttcatcctgaaaggtccttggatatataggagccttgtctgtttcttcaaaccccgtggcagctggtttcatgctccaggcgagctcctgtcctctggggtgtgtcctgctgacccctcgcctgtgtttgtgttcgcaggactggaatgtcacgtggaataccagcaaccccgacttcaccaagtgctttcagaacacggtcctcgtgtgggtgccttgtttttacctctgggcctgtttccccttctacttcctctatctctcccgacatgaccgaggctacattcagatgacacctctcaacaaaaccaaaactgtaagtcactggggggtttcgttgtggggggtgggaaggtgcacctggacggggagtggtggttggtgataactgacatttctcttctacttagttgaccctaagttccttcttctagaaggcagaagaataatgtgggaggtgaaaactggagctcgggagacaaacatgggtacaaatctttgctctgccgcttagtatttggcctcgagcaaattttttaacctccccaagcctcagtttccctgtttatgcaataggaatgataggcttgttctcaaggcattcctgggagattatcagctcttcccctcttactgagccgatctcctttttatttaattaaatatatttatatagattttttctggccaatttttaatttattttttgtagagaggggggacttgctgtgttgcccgggctggtcttgaacacctggcctcaagcagtcctcctgccttggtctcccaaagtactgggatgctcagtgtgaaccaccacgcctggcccctaattttttttttaagttggcttttattttgaaataatttaaagctacaggaaaattgcaataatgggccaggcgtggtggctcacgcctgtaatcccagcactttgggaggccaaggcgggcaggtcaggagtttgagaccagcctgaccaacatggtgaacctgtctctactaaaaatacaaaaatgagctgggtgtggtggcatgtgcctgtaatcttagcaacttgggaggctgaggtgggaggatcccttgaacccaggaggcagaggttgcagtgaactgagatagtgccactgcactctagcctgtgcaacagagcgagactccttctcaaaaaaaaaaaaaaaaaaaaaaagttgcgatgataccaggaactgctgcctgattttctctatccatcactcatagtcactgtttcctgttttttttttttttgttgttgttttttgtttttttttgacacaaggtgttgctcttttgcccaggctggagtgcaatggtatgatcacagcatactgcaaccttgaactcctggctcaagccatcctcctgcctcagctttttgagtagctggtagctgggactgcaggcatacaccaccatgcctggctaatttaaaacaattttttgtagagacagggtctcgccttgttgcccaggctgttgtcaaactcctggcttccagtgatcctcctgcctcggcctcccaaagtgctggtattacaggcatgaatctggcctgtattcactgattttttaatcttttgctacatttgttttatcatgagcttttgttctctctctctgtatgcatgctataatttattttttctgaatcatttgagaatggatgcaccttgaaacatatcccacccgtagagggctctcagtaaatactggttgaatgaatggttgtcgtggagggctttcttgtgcagtgcgccggagttgcagctagagatgagctgtgagctgagctcttgagtgttcaggcaccggggagcatggtgaccagacaaacagtcctgttggaggtagtggggcgtagcaggctgattacagaccatcacgtgccggcctggatgccagctcaccataccgaggacttgtccttattccagtggatatgtgccatgtcctaggactgtggctgatcatttgaaggctggctggttctcctatccctggggctgagctgttcgtgcaggccctgggggaggttccagggacggtctgttgtaggatatgtatgtgcttctcttccaggccttgggatttttgctgtggatcgtctgctgggcagacctcttctactctttctgggaaagaagtcggggcatattcctgggccccagtgtttctggtcagcccaactctcttgggcatcaccatggtaagtaggagctggctgtgacccctgagacatctgctgggctcagtggagaccaaaagtaataactcgtaagactagaatcatagttttttaaggcaatgatcagctggagctgggatataaattaaatgtagcctttttttttttttttttttttttttttttttttaaagacatgagatctcgctttcatccaggctggagtgctatggtaccatcatagttcactgcagcctcaaacttctggcctcaagcaatcctcctacctcagacttctgagtagttgggactacaggtgtgtgtcaccacgcccagcttatttttggctaattttaaatttttctgtagaaatgggatctcactgtgttgtctaggctggtcttagactcctggcctcaagtgatccttccagagcactggcattataagcatgagccactgttcccagccccagctgcagtctttggatggggcatgtgttgtccagtttgccacagtccccaccatgccctattgtcttccctgccactgattgagtggcagatgcccccttttgttgcgtttgccacactttgctcttgcattggctactttggtcacttatatactaactgcctggggtctaatggccttgagttttcactatctggcatagggggtgggttgctaagctaaataggaaactgctctgtcccgggggatacacaacttagtgagtgacagagacaaggaaacaactttattaattacagctggtgtgtattgagcacttactatgtatgtacctggcagtattcttggtgtttcacgtgtcttgaaattcattgaattttcacaacaaccctgtgagatgggtcctgctttgttcccatcttacaggtgaggaaaccaggcaagagaggttaagtgtcctgctcaagatcacaccactaatgtgcagccgagtcaggggtgggaccccagatgccatgcttttagcccctgcaacctgcagcttctgagccctgaacagagagttctcggagagtgtagcccttgagtattgtaaaaagaggagggaggctgggcatcgtggctcatgcctgtaatcccagcactttgggaggctgaggcgggagaatcacttgaggtcgggaatttgagaccagtatagccaacatggcaaaaccccgtctctactaaaaataaaaaaattagccggcgtggtggcacacgcctgtagtcctagctactcaagaggctgaggcaggagaattgcttgaacccgggaagtggaggctgcagtaagccgagatcgcaccactgtgctccagtctgggggacagagcgagacctcatctcaaaaaagaaaaagaaaaaaaaaaggagagaacaagtttaaggcaggacattctgagcagggtgaacagtgtgtccagggaggggtggaaggttaaggggaggatgcaggcagggaggacaaggtgttcggtgaaggaacacggtgtgaaggttggggggatagagtggatgtgacagaggggtcaggaaagacaaggtggagccaggttgccaaggaccatgaatctttatttttctaaattatttttcattttttaaattttagagtcaaagtactactctgtggcccaggatgannnnnnnnnnnnnnnnnnnnnnnnnnnnnnnnnnnnnnnnnnnnnnnnnnnnnnnnnnnnnnnnnnnnnnnnnnnnnnnnnnnnnnnnnnnnnnnnnnnnactttgcacgacgttgcacgacgtgcaggtttgtaacataggtatacatgtgctatgttggtttgctgcacccatcaactcgacatttacattaggtatttgtcctaatgctctccctccccgcccccactacccccaacaggccccaatatgtgaagttccctgccctgtgtccatgtgttttcattgttcaattcccacctatgagtgaaacatgtggtggttggttttctgaccttgtgatagtttgctaagaatgacggtttccagctgcatccatgtccttgcaaaggacatgaactcatccttttttatggctgcatagtattccgtggtgtagatgtgccacattctcttaatccagtctatcattaatggacatttgggtggctccaagtctttgctattgtgaatagtggcacaataaacatatgtgtgtatgtgtctttatagtagcatgatttataatcctttgggtatatacccagtgaagggattgctgggtcaaatggtatttctggttctagatccttgaggaatagccacacagtgtgtggctattaagcagaatggttgaactaatttacactcccaccaacagtgtaaaagcattcctatttctccacaccctctccagcatctgtcgtttcctcactttttaatgatcaccgttcgaactggcgtgagatggtatctcattgtggttttgatttgcatttctctgatgaccagtgatgatgagcattttttcatgtgtctgttggctgcataaatgtcttcttttgagaagtgtctgttcatatcctttgcccactttttgatggggttgtttgtttttttcttgtaaatttgtttaagttctttgtagattctgaatactagccctttgtcaaatgggcagattgcaaaagttttctcccaatctgtagattgcctgttcagtctgatgatagttgctgaccaggctgcagcatcacaggttgatcttggactgcttcgctagcagtgaccaaggctctgtgggcgtgcgacctgccgagccaggaacgggagagaatctcctggtctgccagttgctaagaccgtgggaaaagcacagtatttggatggaagtgtaccgttcctccaggtgcagtctgtcacggcttcccttgcctaggaaagggaaatcccctgaacccttgcacttcctgggaaaggcgacaccctgccctgcttcagctcacctctgtgggctgcacccactgtccaaccagtcccagtgagatgaaccaggtacctcagttggaaatgcagaaatcacctgtcttctgtgttgatctcgctgggagctacagaccggagctgctcctatttggccatcttggaagtgactcatctatttttatttatttatttttggagaccgcttctctctctgtcacccaagctagaatgcagtggcacgatctcggctcactgtggcctctgcctcctgggttcaagcaattctcctgcctcagcctcccaagtagctgggactacaggtgtcggccaccatgcccaggtaatttttgtatttttagtagacacagggtttcaccattttggccaggctggtctcgaactcctcacctcaggtgatctgtccacctcagcttcccaaagtgctgaaattacaggcgtgagccactgtgcctggctgaacattgccctttaatgttttaaaatgtaggttttattattatctacctatgctgaggccaacaaattaggagacaactgtcattgaaaaggtagtttgcagctgggcgtggttgctcatgcctgtaatcccagcaccttgggaggccgaggtgggtggatcacttgaggtcatgagttctagaccagcctggccaacatggtgaaagcctgtctctagtaaaaaatacaaaaattagctgggcgtggtgagggcacctgtagttccaggtacttgggaggctgaggcaggagaatcacttgaacccaggaggtagaggttgctgtgagccaagagcatgccactgcactccagcctgggtgacagagcaagactccatctcaaaaaaaaaaaaaaaaaaaagaagatcaacgcacaaacatcagccacatttccataaactagcaataaacaatcagaaagtaaaattaagaaaacaatttcacttccaatagaataaaaataaataaatttaaccaagtaggagtaacactagtgccctgaaaactacaaaacgtggctgaaagcaaatacgaagacctaaataaatagaaagacgacgtcacatgttgatatggtttggctctttgtccccacccaaatctcatcttgaattgtactcccatgattcccacgtgttgtggaagggacccagggggagataattgaatcatgggggcagtttttcccgtactgttcttgtggtagtgaataagtctgacaagatctgatggttttataaggagaaacccgtttcacttggctctcattctctcgcttgccaccgccatgtagaaaatgcctttcgccttccaccatgattgtgaggcctccctagccacatggaactgtaagaccattaaaccgatttcttttgtaaactccccagtcttgggtatgtctttatcagcagcatgaaaacagactaatacacgtgtttatgaattagaagacttaatattgttaagatgataatactatcccaaagtgatctatggacttgatataatccctatgaaaatcccaacgtccttgtttgcagacctggaaaattcaaacctaatattcacatggtattgcacccaagagccaatcttgaaaaatgagcagagttggaagactcacacttggtgatttcagaatttactacaaagccacaataatcaaaaggtgtgatactggtatgaggataggcatatagattagtggaatagaattgaaagtctggaaatgacccatacatctatagtcaattgattttttcttttgagacagcattttctctgttgccctggctggagtgcagtggcgcaatcacagttcattgtaaccactacctcctgggctcaagcaatcctcccacctcagcctcccacatagctagtagctgggagtataggcacgtgccaccacacctggctaatgttttttgtttttagtacaaatgaagtctcgccatattgctgaggctggtctcaaactcctgggctcaagcaatcctctcaccttgacctcccaaagtgctgggattacagtcgtgacccactgcacccagtgtggtcagttggctttttgttgttgtttgttcgtttgtttgttttcgagatggagtcttgctctgtcacccaggctggagtgcagtgtcgaattcttgactcactgtaacctccacttcctggattcaagcaattctcctgcttcagcctctcgagtagctgggactacaggcacccaccaccagcgcctggctaagttttgtatttttagtacagacgggctttcaccctgttggccagtctgatcttgaactcctgacctcaggtgatccacccaccttggcctctcaaagtgctgggattacaggtgtgagccaccatgcccagccagtgaatcggcttttgacaagcgtgccacggccattcaataggcgaaagaacagtttccctctctctctttttttaaaaatttcaatagattttggggtacaagtgggttttggttacatagatgaattatatagtggtaaattttgagattttaatgcacccatcatcacccaagtagttacacatgtacccaacatgtagtcttcatccataccctcctctcatcctcccccttctgagactccaaagtcctttatatcactctgtatgcctttgggtactcatagcttagctcctacttataagtgaggacatacaatatttggttttccattcctgagttacttcacttagattaatggcctccagctccatccaaattgctgaaaaaggcatatattttttttcttttttttgagatggagtcttgttctgtcatccaggctggagtgcagtggcataatctcggcacacgcaacctccacctcccgggttcaagcaattctcctgtctcggcctcccaagtagctggaactacaggtgcacaccaccatgcctggctaatttttacacttttagtagagacagggtctcgccatgttggccaggctggtcttgaactcctgacttctggtgatccacccaccttggcctcccaaagtgctaggattacaggcatgagccaccgtgcccagcctaaaagacataatttaatagaacagtctcttcaacaaatgaccctgggaccatgagatatccacatgcaaaagaatgaaattggactttgaactcacgccataatattaacatctaaattataaaagttaaaactataaaatacttaaaagagagcccagagggaaatcttcattatctttggcttggcaatggtttcttaaatatgacaccaaaaacacaagtgacaacagcaaaggttgagaaactagacttcatcaaaattaaaaccttttatgcatcaaagaacagtatcgaaggacagaaaaggcagttcacagaatgagagaaaatatttgcaaatcacatatttgataaggctctactgtctggaatatgtcaagaactttacaactcaacaacaaaaaaagcaaagcacccagtttttaaaaatgggccccggatttgaagacatttctccaaagaagatctacaaatggccaacaagcacgtgaacagatgctcaacatcattcgttattagggaaatgcaaataaaaaccacaaagagatgccacttcacacacaatagaatggttataatttttaaaaatggaaaattacagccaggcgccatggctcacgaggtcaggagttcaagacaagcctggccaagatggtgaaaccccatctctactacaaatacaaaaaaatcatccaggcacagtggcaggcccctgtaatcccagctactcaggaggctgaggcaggagaatcgcttgaacccagggggcagaggttgcaatgagccgagatcacgccactgcactccagcctgggcgacagagtgagactctgtgtcaaaaaaaaaaaaaaaaaaaaaaaaaggaaaattacaagcctgatggggatatggagaaactggaagccttgtacattgctgctaggaatgtaaaatggtacagcctctatggaaaacagtttggcagttcctcaaaaagttgaacatagaattacaatatgacccagcaatttaatgcctgggtgtatactagtatacaggtgttcaaacattaactggcacacaaatgctcatagcagcactattcgtaacggtccataaagtggaaacaaatcaaatgcccatcaattaacgactggataaataatatttagtttatctatgcagtggaatatcattcagacatgaaaaggaagaaaatactgatgcatgctacaactggcatgaaccttgaaaacatcatgctacaaaaaagaaccccagtcaggcgcagtggctcatactggtaatcctagcactttgggaggccgagttgggcagattgcttgagctcaggagttccagaccagcccaggcaccatggcaacagcacgtttctacaaaaaaatacaaaaattagccaggggtgctggtgcacacctgtagtcccagctacttgggaggctgaggtggcaggatctcttcaacctgggaggtcaaggctgtagtgagccatgatatgaaagaaaagaggaaagaaaaagaaaaagaaaggaagaaagcacaaagaacagtggcacacagaaacgacaagcaaccagaaagaaagaaagaaagaaagaaagaaagaaagaaagaacagaaagaaagaaagggagaggaaggaaacagacacagacacaaagaccacattttttgannnnnnnnnnnnnnnnnnnnnnnnnnnnnnnnnnnnnnnnnnnnnnnnnnnnnnnnnnnnnnnnnnnnnnnnnnnnnnnnnnnnnnnnnnnnnnnnnnnnttggccgactcagtgactcagcacgaagtggcctggaggagccagccctgccagctcccacccaggccctgcctgacctgaccccagccgccccaggccttggctgatcactctgaggacaggcgacaggtgatggatggcctgctgctgctctgaggatgggagagcagcaagcctggactctccccatcttcctggctccactgtgattcaatccctgagagtgatgggaaaacaagcaaacaggttgtcccgttgtcctcctccccagatcacagggctcaggtctgggacagagagaggaggtgaagccaacaacaaatcgagttgcaacccgttttcaagaaggggctgctgacgtccccaaaggaagagcaccgagcccaaagccacaagtctagctgattctcacaggacctggttcctacccttccttgcccccatctcaattgctaggctacgttgctaggtagttatgtggttattttgtttgtttgtttgttcatttgttcgttgtttgtttgagacagggtctcagtctgttgcccagactggagcgatctcagctcactgcaacctccgcctcccgggcacaagcaattctcctgcctctgcctcctaaatagcagggatcacaggtgctcaacaccatgcccagctaatttttgtatttttagtagagatgggatttcaccatgttggtcaggctggtctcaaactcctgatctcaggtgatctacctgcctcggcctcccaaagtgctgggtttataggtgtaagccaccacacctggccttgaacaagatttttaaaagcacttagcatcactgaattgcatacttaaaatggttaaaatggcaaatcttaggttacatatatttaaccccccaaaatgcaacattaaaaaaaaaaataaggctcttgacaccatgccaagccttcagaacatctgtgcatacatcagtccccttcctctttcttgctggtaatacttgaacaggatgaaggcagagaagcagcttaatctgatgtcctgtgaggcctcatgcacacttcacccttatgcaagacataatatacgtgccacatgtactgagcacctccccatataacacaacaataaattaccactacaggcccaccgtgtgcctggctgtgtcttaggcactgaggttacaaggtggatactgccacatgaagcctctagcctaacacaaagccattatttagccaagaccctcccattcagcagttacaaccaagcgaagtgacatgattgtgcacaacagccagtcgtgagttcgaatctctgctctactactcaggtcgagcaaggcacttatgtctgcgattgtttgtctgtaaaatgagaaaaatagtaccaagttcaccaggactgctgtgagagtcaagtgagacatgcatataaagaacttagcatagtgctagccagtacaccgcaagcatctaataaatgtcgattcccgtccttgccttgcataggaagaaagaatgcctgcaaatggaaaggggacaaaaaaggaagctaaaaagtcatcagagctaaagaaatgcttagaccacggggtggacaaacttcttctgtaaagggtcagatggtaggtatcttagactttgtgggtgctacagtctctgtagcaactacacaactccactgctgcagctccagacacctgtagacactatgtgatgaacgcgagtggctgtgttccaataaaactttatttacaaaaacaggcagcaggccagattcggcccatgggctactggctaactcctggtctaaactctaatctgcaaaaaggtaaatggcaaccccatggggttcctgaacaggaacccagagggaagttcaggcttcctggacagagagtgtcagccaatcaaagtgttctctcctggacaggtgcacaaatgtcagaaatgcagcagcctgcacacccacatttgacaccctgctggatctcactgcacaagaggcagaccacagccgggcacggtggctcaagcctgtaatcccagcactttgggaggccaaagtgggcggatcacttgaagtcaggagatcgagaccatcctggccaacacggtgaaaccccatctctactaaaaatacaaaaactagccaggcatggtggtgtgcgcctgtagtcccagttactcaggaggctgaggcaggagaattgcttgaacctgggaggcagaggctgcagagccaagatcatgccactgcactacagccttggcgacagagcgagactgcaaagagacaaaccacagtgtcttccaccatcttggaagaccagcagtgacacaggaggagccgagctgggggagatgacacagaaacagaaaacaatgactggggagaagagtcagggtgtcccagccccacaacagtgtagccttttagccgccagagctgagagcttcatgtcacccagggtggcagagcaaatcccaggcccaggctgccaggaatgcagaaagcacaaaaaaaggtccaagtcagatctgtgagtcaccctggtacacacacgcccaggggagaagtgaaagggaatttatccagattcccaagggagatcagaaattaagaaagtccctccttcaaaaagcttccagaaccatccatggcaagagagctcttcccaggctcccagaggaagcttgatgggttgggtgatccccacgccagccaggcagccccaaccagactctgtttaccctgagcaatccaaggtctgcagccacccagttgaggtgtgacttgttttgtataaatcccagttctaaagaatggctcggccagacacggtggctcacacctgtaatcccaacattttgggaggccgaggcgggtggatcacttgaggtcaggagttcgagaccagccgggccaagatggtgaagccccatctctactaaaaatgcaaaaattagtcgagcatggtgatgggcgcctgtaatcccagctactcaggaggctgaagcagaagaatcgcttgaacccaggaggcggggttgcagtgggccgagatcatgccactgcactctagcctgggcaacaagagcaagaatccgtctaaaaacaaaacaaaacaacagaaaaaaacaacaaacaaaagacaaaaaagaatagcccaacatttgacaaacagggacactcggctgccacacacttacacacactgatacacaatacatataacagccactgactcatgagcccctctcttctgtgtcaggcaccagccagggatccaaaatggggtgacccctgggctcaagcgatcctctagccttggcctttcaaagtgctgggattacaggcatgagtcaccattgcctttgtgaactttatacatatgcaagcacacacaacacaaagacacacacacacacatattcaaacacacacatacatgaacataaacacactcacaagcacacattcacatataagcacatacacgcatatacatgcctatgactaccgagacacacaagcaggcacatgcacacgtacacacagatgcacaggaatacatacacagatgtgtgcacttgctcatttctccaacccagctcctctttgggcaaggaaataccaacacgggactcctcagaacatacactgggacatgcatttcttttttctttttttgagacagagtctcattctgtcacccaggttggagcgcagtggtgtgatctctgctcactgcaacctccgcctcccagggtcaagagattctcctgcctcagcctcccgactagctgggattacaagcatgcaccaccatgcctggctaatttttgtatttttagcagagatggcatttcaccatgttggctgggctggtctcgaactcctgaactcaactgatctgcctgcctcagcttcccaaagtgctgcgattacaggtgtgagccaccacacctggcctgagacataggtttctaaaatctcttagttatcatcaacctcctcctccatactgatgcccaccaagccctttcgtcacccacaaggtgagcctctgcccctcacagaggtttaggccaaacccaacagaaccacagaggtgaaaagttctcccactgcaatccgcccattaccagctgactagccatgaatcagcatcaaataggtgctccaaggcctccctgccccatactcacaataaaacccaaacagctcatctggctcacaagggggctgtcccacctctcaggcacccactgtctcttagccttctcctgctgtgctggcttttcttgctgttctctccacacctccccaccccagggcccttgtacttattcccctctgcctggaacactcttcctctaggtgtttgctccacccactacctcaccccttaggtctccgctcacatgcagttttctgggcaggccttcccagatctctcttatcaaaagctgcacatgagccagggcaacacagcaagatcccatctctatttaaaaaaataaagaataggcgaggcgtggtgactcacacctgtaatcccagcactttgagaggccaaggcaagaggatcgcttgagcccaggggtttgagaccatctccccatctttaattattaattaattaaaagtaagccaagttggggagcaggtgtagggagaacatcaggaggaatagctaatggatcctgggcttgattcctagatgatgggttgatctgtgcagcaaatcaccatggcacacatctacctatgtaacgaacttgcacatcctgtacctataccctggaacttaaaataaaagttgaagaaagaaaaaaaattagccaggcatggtggtgtgtgcctgtaattccagctactcagaaagctgaggtaggaagattgcttgagcccaggaggtcaagactacagtgagccgagatcacaccactgcactccagcctaggcaacagagcaaaaccctgtctcaaaaaaaagaagaaaagaattaagggaaattaataaagtgttcccttttgttctactagcagaaacggtggccatctctacactcctcactgataagtttccatatttacagaatttctctgaaactgacaaaatagaccaaggatctcacactcaaatccctcaggggccaggcatttgccacaagtgaggaaagcatgccagtataatacaacagggagtgccggggactccagcaactcctcagctctgccctgtaggattataggcctaatctgtcagaactttacttttccagaacatctggacagctagaattcataaaaaatacctgatttgtaattatctgctcacattttccaaaatcaccatgccaagtgagaaacctacaggcctgcaagacagcagttcatcaatgacaaagcagattctctccttcagctcccccagccacatctaagcctcagtttttccatctgtaaagtaggtgggatgatattccctgtatcaggggttgagggaggctggaacgagatcctggatggatctaagaaatgttagctggtactgtgtcacgcatctctctcacacacacacgcacacacactcatctgtggtcacacttacagggtcgtggatggtttccgagaacaggggtgagcgatctgagaaacaggacaagacgagctgaatgagtaagagggaaaagtagacgtagaaagtgatgtcacgaaacaggtccacctgggcatcctacatggtggggaaggaaggaagaaaaagatcacattctggggctgggtgtggtggctcacgcctgtaatcctagcacttttggaggccgagacaggcggaacacctcaggtcaagagttggagaccatcctggtcaacatggtgaaaccccgtctctactaaaaatacaaaaattggccagacgtggtggtgggcaactgtaatcccagctactcgggaggctgagacaggagaatcacttgaacccaggaggcggaggctgcagtgagccgagatcacgccactgcattccagcctgtgtgacagagcaaaactccatctcaaaaaaaaaaaaaaaaaaaaaaaccaagatcacattctgagagcaggtggcagaaacccactcagccacagggacactgcaggctccccaggggctcccagctccccccgggatgtaatggcagaaagccggctccatcacgggtagtctcactgctcaccgctgcctgatgggaggaagacagggcttgggagtgaaacagagctgtatcaaggcctggctctctcacactggctgtgggatcttgtcaacttatttaacctttctgtgcctcagattccccacctataaaccaccggtggttcttaaccaggggtgattctgcctcccaggaaacatctggcagtgtctggggatatcttctttgtggtaacttgggagtgttatggcacccagtcaggggaagccaggggacacccctaaatgtctacaaagcacaggacagcccctacaaccaacgagtctccaatccaaaatgtcgattagtgctgaggctgagaaattctgtccaagtcactgcaagaggtcaggaagattattcgtgacacaacacagtcccctgcgaggcactttgaaaacatgaacttcaatcagcatcagctgctatcactcataataatatgtaggcaatcaatagtcagggatccttagagtgaccttgcagcatgaagctttggcacctgtcccgttcgnnnnnnnnnnnnnnnnnnnnnnnnnnnnnnnnnnnnnnnnnnnnnnnnnnnnnnnnnnnnnnnnnnnnnnnnnnnnnnnnnnnnnnnnnnnnnnnnnnnntagctagcctcgtccgccagagtttcagtgagctgagatatgcctccgcacttcaacctgggccaaagggagagagtctgtctcaaaaaataaaaaaaaaaaagaaatttgttttgtagaaatgaggtctcactatgttgcccaggctggtctcaaacttctggcctgatgagcaatccgcctgcctgggcctcccagattgctggtattacagacatgagccacagtgcctggctcttgaataatgtatattagttttgcctattgttgaacatcgtgtaaatgagatcatggcaaatatgctcttttgtgtctgccttgttttgctccttgttgtgttttgtgggattcatacatattgttgctattatgaacattttttgtagatgtgttttggtggatgtaagctcacctttcttttggaggcgagtggaatttctgtgtcactatgtaattgtatgtttcactttagcacgaattattagttttctttcttttttggagatggagtctcactctgtcacctaggctggagtgaagtggtgcgatcttggctcagagcaacctgtgcctcctgggttcaagtgagtgttgtgcctcagctccccaagtagctgagactataggcatgtgccacaacgcccagctaattttattttattttattttacttttgagacagagtctcactctgtcgcccaggctggagcgcggtggcgcgatcttagctcactgcaacctgcgcctcccaggttcaagcagttctcctgccttagcctcccgagtagctcggattacaggcatgtgccaccatgcctggctaatttttttgtattgttaatagagatggggtttcctcatgtcagccaggctggtcttgaactcctgagctcaggcaatccacccaccttggcccacctttttgtattttttgtagagatggggtttcaccatgttgctcaggctggtctcaatctcctgagctcaagagatccacctgcctcggccacccaaagtgctgggattacaggcatgagccactgcacccagccaaattgttagttttccaaagtagttaagccaatttatatacctcccaacagagcgtgccttttccagttaatccacgtctttgtctgcactcgtaattttcagtctttgtttccagtcactctggtgggtgtatgatggtatttcactggggttttatttgcatttccctgatgactaatgaagttgagcatgttttcatgtgcttgctcaataaatatttgttgaaaggatgaataaagagtgaatgaataaaacatggaaagaaatccaactctgtcttgtgccctgcctaaaacccaccagtggttcccactgcccctcctttggccgacgggtacctgcctgccctggctccttctgaccccacctgctccggatggatttcttttgcttcttctctgggttcctgccatccaggctgtcttcagtttcctccaaggaccctccctgcttcataactttgctataaactgttttcttctgcccagaacacaacccaggcccaaggaacccagacgcgttccttgtatctcagtttgaaagcctcttcctccaggaagccttctctgacttccaccccccagcaagggtggtataaattgctaacttaggcccacttttgcccactttttttgtttgtgtttttgagatggagtcacactttgtcgtccaggctggagtgcagtggggccatctcagctcactgcaacctccatctcctgggttcaagtgattctcctgccttagcttcctgaatagctgggattacaggcacccaccaccatgtccagctaatttttgtatttttacatttatttatttatttatttgagatagagtattgctttgtcgcccaggctggagtgcagtggcatgatcttggcttactgcaacctccgcctcccaggttcaagtgattctcctgcctcagcctcccgagtagctgagcctgcaggtgcctgccaccacacccagctaatttttgtatttttagtagagatggggttttaccatcggtcagactggtctcgaactcctgaccttaagtgatctgcctgccttggcctcccaaagtgctgggattacaggcgtgagccaccatgcccggccaccactttttttttctagctgtgaccatagttgtacatatctccccttccctggcttttttttttgttttttttttcctgagacaggatctcgctgtgttacccaggctgcagtgcagcggtgcaatcatagctcactgtagccttgaactcctgggccaaatgagcctcccacctcggcctcccaaagcactgagattacatgcgtgagtcactacttctggcctgtaaataccctttcaaaaatataatatttgattaacatctgccatcttaccataagaaacacttaaaaaaatcccaatccaaaaaaattccaatcctttaagctatataagagtagcaattttatcttgttcctagcaagacatctggcatatagtaaatgctcaataaatatttgttgacagtataaaggtcaagcaacagcataactggcattattacatgaaagtaattatcccttagaaactcattcacccttgggggacccgggccaataaaaaaatcacagaaaacaatcctatctaccttcctccttcctccttccctcgctaggtcctttgattggggggaggtctcaaatgcacacactgtttctgttttatttggtgcagctgttgtgtgcatgtgttatggaaacccacatcaggcaggagattaaggaggagaggagaaaagaaaggcatcgctggtatcacagtgaaatttacactctgcggcctcgccctagctcctctgtctctacctgtctgcctatgaaacagttcaaaactaatatggcgcaatggatggtattatagacttcccacctccctggccagacttcttgggttcaaagtttggcttaatcacttaccatctaaataatccctgacaatgtactctgtctttctgggccttagtggcctcatctgcaaaatggggataatactacttcttacctcatggggttgtgaggattgcacaagttaatttgtgtaaattgctaagaacacagccttaggaagccttgtcactgtgaatgcatattaattttttttattattattttttgagacagagtcttgctctgttgcccaggctggagtgcagtggtgtgatctaagctcatttcaacctccgcctcccaggttcaagtgattctcctgtttcagcttctcaagtagctgggactacaggtgcccgccaccatgcccggctaatttttgtgtttttagtagagacagggttttgctatgttggctaggctggtcttgaactcctgaccttatgtgatcggcccgcctcggcttcccaaagtgcttgattacaagcacgagccaccatgcctggcctacgattatcatgtctccaggcttcagtttccttacctctgaggtgaggatcaataacctggttatttctaagtgatgcttaaagaggttgagaagaagcaaaggcgctctgcacacaggtgaggtcaacagctgttagtgatggagactggcgccgtctgggtcatcagtgctccggaatcaggctgctcacgggtttgaatctcacttccactttcactccttattaactgtgtgacctcgggcaagtcacttcgcctttctgaacctcagtttccccatctgtaaaaggtaggtgaataacagtattcacctccttctgtgtgactcagctttggagtcagcggaccgggttcaaatcccagccctgcaagtgattagccaggtgaccctgggcagagggaatcactcaacctctctgcacctgggtttcttccttcatgaacgtggagactttacaggatgaaatgagggcacagttaaggcgcccggtacactccaggcagggggctccgttcacgttattttcccctggtgacggatactgtccttaaacaggatttgaaaagtggtcgcagggtgtgtggccccaaagatcccaggcgcttccggaaggcgagccaacgctccccaggcccgtccgcgagcgggtgggcctaagccttggaggatctggggtgggggtggcgcggggtccaggcccggggcgccgagaggtggctggtccggctgcccacgccgagacgcgcgaggtgagcgggcgccggggcggggcggggtggggcggggccgcgcatccccgtgacgcgcgggccaaccaggcggcgttgcggcccggcccggctccctgcgccgcgccgcgacgccgccgccgccgacgcagcgctacgcagcagccggcccgatacccgcgccgtgccgcgcgcggcagaacggccgatacnnnnnnnnnnnnnnnnnnnnnnnnnnnnnnnnnnnnnnnnnnnnnnnnnnnnnnnnnnnnnnnnnnnnnnnnnnnnnnnnnnnnnnnnnnnnnnnnnnnncttgaacctgggaggcggaggttgaagtgagccaagatggcgccattgcactccagcctgggaaacaggagtgaaactctgtctcaaaaaaattaaataaataaataagtaataaataaataaaatgaactaatgcatgaagagcacttagttaaattaaataaataaataaaatttttaaaaaataaaattaattaaataataaataaataaataaaatgaactaatgcatgcaacaacttagcacagtgcctaggacataataggcactcgataagtgggctgggcgtagtggctcatgcctgtaatctgagcactctgggaggctgaggcgggcagatcacctgagctcaggagttcaagaccaccctgggcaacatggcgaaaccccatctgtacaaaaattacaaaaattagctgaccatggtgatacccacctgcagttccagctacttgggaggctgaggtgggaggatcacttgagcccgggagactaaggttgctgtgagcccagatcatgccactacactccagcctggtggacaaagctagaccctgtcacacacacacacacacacaaaagtggctatttcctcaccattccccccttggcaggtcacagcccagtccactccactcctccatggtctccattcttgtcgcctcgacaccagatggcctggattaggtgtgtaagaacatatttatgctccagttttctcttgtcaaattcctcatccttcctctccccttcccagatgttctccattctccgcaaatcctctacctcacctccatcttccacctgctctttggtcactctgtctcctactcaactaggaagaccctaggaaccctccacttggaccctaaatctctttgcattttaacctttcattcatgaattcattcattcgaaagatattattgagcatctactatgtaccaggcactaaggatactagagtaaatataataaacaggatcctggctgggtgaggtggctcatgcctgtaatctcagcactttcggcggtaaaggtgggtggatcgcttgaggtcaggagttcgagaccagcctggccaacatgacaaaacccgtctctagtaacaatacaaaaattatctgggcatggtggtggcacatgcctgtaatcctagcaacttgggaggctgaggcaggagaatcgcttgaacccaggaagtggaggttgcagtgagctgagatcacaccactgcactctagcctgtgcaacagagcaagactttgtctcaaaaaagtaaacacggtctctactcacatagagctcactggccaagagaaagggcagcaattcatcaaatatttaattacaaactcagataatactataatgaaaaatgcagagattctgagacagtcaggggccataacctagcctagttggtggttatggaaggcttccatatcagcatgtgtttctttcctttctttttcttttttcttttcttttctttttttctttttcttttttttctttttgagatggcgtcttgctctgttgcccaggttggagtgcagtggcaccgtctcatctcactgcaacttccacctcccaggttcaagcaattctcatgcctcagcctcccaagtagctggggttacaggcttgtgccaacacacctggctaatttttgtatttttagtggagtgcagtggaaccatctcggctcactgcaacttctgcctcccaggttcaagcgattctcatgcctcggcctcccaagcagctgggattacaggcgtgtgccaccacacctggctaatttttgtgtttttagtagagatgaggtttcacaaagttagccaggttggacagcacgagtttctatgcaacacactgtcctaaaacttagtggcttaaaacaacaacaatcattgatttcacccccaaatctgcaatttgggcaggatgtggcctggacagcaagtctgtgttccacatgccatgctcaacatggggcagcttgacaggggctggaggacccacttttttttggttgtctctgagatataatttacatgccataaatttcaccatgtgaaaccatacaattcaatgctttttagtatattcacaggattgtacaactattgctatctaattccacgatatttccttttccctaaaaagaaatcctatacttatctggatgtggtggcgcacacctgtggtcccagctactcgggaggctgagacagggggatcaattgagcccaagagttccaggctgcagtgagctatgatcgcaccattgcactccagcctgggtgacagaatgagaccctgtttctaaacaacaatgacaagaacaacaacagaatatataccattagcagtctcttctattccctcttcccctagtccctggaaacactcatctatcttctgtctttatagatctgtctgttctagacacttcaaatggaatatacactacgtggcctattgtgtctggcttctgtcactgagtacaatgttatcaagattctggaagacccactttgtggatggctcagtcacatggctggcaatttggtatttgctgtcaggtgggaactcagccagggctgtgggcagggatcccatttcttctctatgggggccccctccacgggctgcttgagcttccttatggcatggtggttgggttccaagatggagcatcctaacagagccaagtgggagcttttcatattttttttttttcaattgagacaaagtctcactgtcacccaggctggtgtgcagtggcatgatcttggctcactgccacctccacttcctgggttcaagtgattcttgtgcctcagcctcctaagtagctgggactacaagtgagcgccaccacgcccagctaattattgtatttttagtagaggctaggtttgccatgttggccaccctgcgtcagtatttacttaaaaaaaaaaaggagcagcatgaagatgagagtacaagggtcttggcgttgttgcccttgagcaggtcacagcccagtccactccactcctccatggtcttgaactcctagtctcaaatgatcctcctgcctcatccttccaaagtgctgagattacagatgtgagccacgatgtccggccagcttttcaccttttatgaccagtttcagaagtcacaccatgtcacttccacagtagcctcaagctcgtctggattcaagggaagggaacacagaccacccttcacaataggagtgtcaaagtcaccttgtttgcgttttaacttttcattaatgcattcattcattcaaaagatattattggccaggtgcagtggctcaaacctataatcacagcaccttgggaggctgaggcggatggatcacctgaggtctggagttagagaccagcctggccaacatggtgaaaccccgtctctactaaaaatacaaaaattagctgggtgtagtggcatgcgcctgtaatcccagctacttgggaggctgaggcaggaaaatcgcttgaacccgggaagtggaggttgcagtgagccgagattgcgtcattgcattccagcctgggtgacaagagtgaaaatccatctcaaaaaaaaaaaaaaaaaaaaaaaaagtcacaccatgtcagttccacagtagcctcaagctcatctggattcaacggaagggaacacaggccacccttctcaataagagtgtaagatcactttgtttacattttaaccttttattcatgcatgcgttcattcaaaagatattattgagcatctactcatgaatgaataattgtggccacttttggaaaatacaagtgctacagcttccctgagaagatgatgttggggctgacagctgaaggataagcaggtgttacttaggcacaggtatggaagagcattcaaaaaacacagaacaacgtgttcaaaagacccgggggaacaattagcacactggaggaacttaaggcggccttgagtggcagaggcagagagaaaggcacttgtctgttgtgtgctttccatgactgctgtttccactcagccttcattgtccattttttcagaaacagtaccctaaattccctttggggaaccattgactcacccgccctcagccctctcagtggggctggctgcaggggtgggtgttaagacccaggtctagccattcaagacagttcacccagcctcgccagtctcactgattggttcgggtgtggtcatgtgacactcagaagggccaatgaggctcaaacccaagacatctgctgcagctattggacaagacagagtgtattgccttggggttgctaggtaggatagaggcaggagtggttgggtgtcacctttgcctctgccagagaataacctgttgaaatgacaccaacaaagagaaagtagaacgaagtgacacagaccattgagctcctggactatgaccaaagccagctctgccactggacattttagattcatgggccaatacatgatggtttaggctaatttgaatttctgtcacctggaatcaagagtactgtttaaaggcaccatcggtgggcgcagtggctcatgcctgtaatcccagcactttgggaggccgaggcgggtggatcacccgaggtcaggagtttgagaccaccttggccaaaatggcaaaactccatctctactaaaaatacagaaaatagccgggtcatggtggcacgtgcctgtaatcccagcaactagagggtctgaggcaggaggatggcttgaacctgggaggcagaggttgcatgtgagccatgattgtgccactgcactccagcctgggcaacagagtgagactccatctcaaaaaacaaacaaacaaacaaataaataaataaatgacactatggattaggattttttctcttcctgtccctaactacacattctccattcctggttcttacgtaccacttcagaagcctccagcacttcatctggcctctcttccttctctctctctttcatttcttattttttttgagacagagtctcgatctgtcacccaggctggagcgcagtggcgcaatcttggctcactgcaacctccaccttccaaggctcaagtgatcctccagcctcagcctcctgagtagctgggattacaggcacacaccaccactccaagctaactttttgtatttttagtagagactggtttttgccatgttgcccaggctggtcccaaacttctggccccaaacttctggcagatcaagtgatccacctacctcggcctcccaaagtgctgggattacaggtgtgagccactgcacctagccttctctcttttttttgtgatcaataaatgtttgtttattgcatcttggtctgaatgtcatattaaatttggggttccaaaaaactctagaaaacatttatgagaacttgggaggtggaggttgcagtgagccgagatcgcgccactgcactccagcctgggtgacagattgacacttcgtctcgccaaaaaaaacaaacaaacaaaaaaaaaaaacaaaaaaaagaaaaaaagaactaaatgtccctgaatataaaatggtaggtaagaacagtaattggcttgtcgatcaatgatgaatcaaacagaaaatgcatgacagattatggggaagtttaaaatgtccaaatattatgtcccagaagaatttgtctagataatagatcttcctcagtccctttcaggggatggatggatagtggacatacttgggcaggtttattcagggtaagctggaggaatgtgtcaaataggtagctacctatctgatttactttcatcctattttttctgctcttaaaacaaaataacctcctattggttaaactttttttttttttttggttgcaaatcaaactctcttactggttttaaaatatcaatttcttttctttttctgtttctttttttttttgaggcggagtctcactctgtgacccaggctggagtgcaatggcatggtcttggctcactgccacctccgcctcccgggttcaagcgattctcctgcttcaggctcctgagtagctgggactagaggcatgtgccaccacacctagctaatttttgtatttttagtagagacagggtttcatcatgttggccaggctggtctcgaacttctgatcttgtgatctgcccgccttggcctcccaaagtgctgggattacaggcgtgagccaccgtgcctagcctattttttttctttttctttttctttttttaagatgaagtcactctctgttgcacaggctggagtgcagtagcacgatcttggctcactgcatcttttgcctcctgggttcaagcgattctcagcctcctgagtagctaggactataggcgcgcgccaccacgcctggctaatttttgtatttttttacagagggggtttcactatgttggccaggctggtctcgaactcctgacctgaagtgatccacccaacttggcctcccgaagcgctgggactacaggcatgagtcaccacgcctggccaaaaaaaagattaatcttaaacataaccagaagtctagatgtttgacaggtttatttatttattgagacaaggtctagctctgttgcccaggctggagtgcagtggcgtgatctcttgggtcactgcaacctccacctgtgggttcaagacaccctcccatctcagcctcctgagtagctgggactacctgcctggctaagttttgtatttttagtagagaccaggtttcaccatgttgcccaggctggtcttgaactcctggcctcaagtgatccagcacctggcctcctaaagttctgggattacaggcgttggccaccatgcctggtcagtttggcaggtttaagggttgacttatgcctgtgactgtggctatctttctttatattctcatggcttaccccaggctggccacttgtaatatatggtcatcttaaccaaattagaaaaaggtattccagttgatgtggtggctcacgcctgtagtcccagcactttgggagaccaaggtgggtaggtctcttgagcccaggagtttgagatcagcctgggcaacataacaagacctcgtctctacaaaaaatacaaaaattagctgggcatgattgtgcatgcctgtagtcacagctactcgagaggctgaggtggagcccagaaggcagaggttgtagtgagccaagatgggaccactgcaccccagcctgggcaacagagccaacctgtcttaaaaaacaaaaaacaaaaaacctgacatgggactttgaatattctagtattgaatgaatgaggaataaagagatggatgggtggatggatggaccggaacagatgaatgaattgatagatggatgagttgaatgggtgatggaaggatggatggatggacaggtggatgaatggatggatgggtggtggatgaatggatggacaactgaatgaatgaatgaatgaatagattgacaagtggatgggtgatgggtggaaggatagatggtcagatggatgggccatggacggatgaacggacagatggatgagagagagagagagattcctctgggcagcagacaatttccttaaaaacaaacaaacaaaatctcctttttcgggaagatacaaccacacatacgggctgaatgtcagcccccaatcatctactcggcacttccatagcacagggcacaattttgggcaagtgctcatttcgtgaggaccacagacaggcaccatttttttaagggttggtgggatgatcaccactgtttgaggccttatattcaaggattacaatgttcagaggagaaaatagaacgacttccaggatctctgccagagcgccaggaagaacttcctcggaaacatttaacaaaactctcctcgtatctcattggcctgatttgagttacatttcctttcttttctttcttttttctttttctttctttctttctttctttctttctttctttctttctttctttctttctttctttctttctttccttccttccttccttctttctttctctctctctctctttcttttttctttccttccttctttttttttttcttttttttgagacatggtccagctttgtcgttcaggctggagtgcagtggcacgatcttggctcactgcaacctccgcctctgggttcaagcaattctccccgcctcagcctcctaagtagctgggattacaggcacccatcaccacgcctggctgatttttgtattttttagtagagatggggttttaccattttggccaggctggtcttgaacccctgaccttaggcgatccgcctacctcggcctccgaaagtgttgggattacaggtgtgagccaccgcgcccggccttctttctttttttgaggtaagattcacaaaacatttttaaaatcaccctttggggccaggcatggtggtgtgtgcctgtagttccagccactagggaggctgaggcaggaggatcacttgggcccaggagcctgaagtgcgctatgatcactccactgtacttcagcgtgggtgacagagtgataccctgtctcaaaaaaaaaaaaaaaatcaccatttaaagtgaatagttcactgttttttgtcacattcacgatgttccacaggtatcatcactatcttgaacattttttcacaggaaacaaaagaaaaaacaaagccgaactaaaacaaaacgtaccttagcaatttcttcggcctctctgnctggaaccatttccgttccgnnnnnnnnnnnnnnnnnnnnnnnnnnnnnnnnnnnnnnnnnnnnnnnnnnnnnnnnnnnnnnnnnnnnnnnnnnnnnnnnnnnnnnnnnnnnnnnnnnnnaaagggatttaaactctcttttaattggaaacttagaaaacccttcacatccttaatcattcagtaagagagaccacctgtagatatgcacatgctgcgtttccatggaatcctagaggccagtatattatgacatacttcccagtttcagagatgttaggatataaaaatgtagccagcagtgtttacaggatgggctaatcgagagacacagacaaatatcaaagatagcaaaataggaagaaacagagtcttagaatcaatgcagtataataatagcttctagtttctttctgtttttctttttatgatacagagtctcactctgtcgcccaggctggactgcggtggcatgatctcggctcactgtagcctccgtctcctgggttcaagtgatcctcccatctcagcctccaagtcactgggattacaagttgtttgccaccatgcccagctaatttttgtatttttaatagagacagggtttcaccatgttggccaggttggtcttgaatgcctgacctcaagtgatcccccccagccttggcttcccaaagtactgggatgacaggtgtgagccaccatgcccagcctccccctcactcttaagcacagctcttcggcagtcagagatgttgcctgctgtatttctcgttctgcttttacacatggtttaaaaatcctcgcccaagaatgtaagccccatggctagtgctacctgctacctttaggggtggcctctcctggggtgcaggaggttgcacagttcgttttgtgacagcagggtcattttttaatcggatcatctgccccagtttgcttggctcttaggtgcttgggagttctcctggttttttgctgttgtgaaatggcccagcttgtacacgttgttccttttcttgctggagttatttcctttagactcctgtccctaaagtaggattgttgggtgaaaatggggtatgcgtggttaggcttttctctgcctgctttctggattgctcttcagatagatttaatcaccttttatttatgttttgtggtggttttttttgttttttttgttttttttgttttgagactgagttttggtcttgttgcgcaggctggagtgcaatggtggggtctcggctcacagcaacctctgcctcctgggttcaaacgattctccttcctcagcttcctgagtagctgggattacaggcatgcgccaccatctctggctaattttgaatttttattacagacggggtttctccatgttggtaagctggtctggaactcccaacctcaggtgatctgcccgcctcagcctcccaaggtgctgggattacaggcgtgagccgccacacctgggccaccttttatttgttgaatgagtgtttaataagcatgtcctatatgcatcaggagaattaaatggacatggtcttgctttggggggaaatgacaggtaggagagaaagagacacttagaactcaacagaggccagacgcggtggcttacgcctgttatcccagcactttgggaggctgaggtgggcggatcacctgagatcaggagttcgagaccagcctggccaaaatggtgaaatcccgtctctactaaaatataaaatcaatcaggcgtggtgatggcacatgcctgtgatcccagctactcgggaggctgaggcaggagaattgcttgaacctgggaggcagacattgcagtgagccgagattgcactactgcactccagcctgggcagcaagagcaaaactctgtctcaaaaaagaaaaaactcaacagagaaaaggcggatcgttaaggcttctttggcacttcctaagtgccagggactgttgttaatgcctttgaagtgctaataatgacttaatggtgacaagttccctgtgaagcagggactgtgattgtttctaccttatgggtggggaaaggaggcagagagaggtgaagtcacccagctagtaaatgacaggactagactgaaacccaggctgtctgtctccagggcctggccggtaccccatgctccatcttgccccataaacaccctggggtgggccagagaggagtcttttccaacaggctgtgccagatgactttggctaatcttggaggctggaggattagtcagtctactaagggggcttcagcattttggcacgtggctttatgagctgtttactccaacagtgatgatgacaatagccatagtagtgataatactatggtagaagtaactgcagcaaactcaacccctaacgagtattctatcttcccaacattgtgtgcaatagccatgagagatgggtgttattcttttaatttgacacacgggaactgaaagccagagagattgggtggcttcccccaggccacacagcctggaagtagtaggacagggactggagcccagatctgctgccccagagcctgtgcccttgaccaccaagtcatggtcactcctttcaaccctgcctgcccctgggccatctgtgttgtgatgccggctggccaggatggggagtgaggatttcagtttgtcatagggcagggagatgggtgaggcaggacactccttgagatggaaggctctggggtcgggggagagggagtggtggagactggggtgtctccgaaggagtgtttgaagatgacgatggtttttccagtttcctgttcttagctatattcaagaaaagggtaagccagaaaatttccctctgagtttcacaacttctgggagcttttgcaaagtctgggtgatgcagcattttcctggtttgaatcctaagtgaagttttcattttccttcacttaactcattctggctctggcctgtcttcccagctgtattggccatctggtcctcttctggctctttgtcccatttattattatttatttttatttttaacagagatggggtctcactgtgttgccgtctgttctggaactcctggacccaagtgatcctcctgcctcggtctcccaaaatactgggatataggcatgagcctctgtggccagcttataccccctaagcttgtgactatcttctatgtgtgtccctcttggagtgaggttccctcctgtctccatgttggcaaatcttagcaccttggcccttcgagatggaggtctgtgttgcctaggctggtcctgaactcctggtctcaagtgatcctcccatcttggccttccagagtgctgggattacaggtgtgagccactgtgtccagccaacccttcttagattttacttacttcaagaagcctgctttgacctctcaagtggaaataacaacttccaggaatagagtgatcactgggcatccatctgttgtcacatgaatgattttatccatattaaggaggcattacatgcagcagtgagctaacctgcctgtgttgaagttttcttctttttacaggctgtacaaccttgggcaagttgctttacttctctgtgccttagtctcttcctcagcaaaatggaaaaaatactacccatttcaaatggggtgaaaatgaaataatatataagtctcgtcttcacaatgtctctgatgaaaagcaggtattggttgcacatggtgctcatgcctgtaatcccagcactttgggaggccgagcagggaggattgcttgaggccaggagcttgagaccagcctggggaacatggccagaccacatctcttaaaaaaaatttagctaggtttggtggcatgcacttgtggttctaactagtttggagcacggtgaggtgggaggatctcctgagctcaggaggttgaggctgcagtgagctgtgattgcacacgactgctttccagcctgggcaacagagtgaaaccccatctcaaacaaacaaacaaacaaacaaacaaataaacaaaaaacaggtattgtccttgctgtatgaatgaggaaagtgagttttcctttttgctttgtgaaactcttttctggatatttcttgccttttatgtgtatctctttggtggtactctgtgcttttaaaatcttttgtaatggccatttatggacaaatcgtatcttatattcaagattctaagctttctgagggcaggatataaatgtggttgtttctggttcaagtcctgatacaagcaaagctcagtaatttttttaaatgaatgggtgggccggtggttgggtcttcagagtcactaaatactggtggcaggagtgggaccacatagaaaaaaatattaaggcagtggatctcaatggggagtgatctgcctctcagaggacgttcattgatgtctagagacatttttgttgtcacagtttgggatgggggtgcagttggtgtctgttgggttaggatcaggaatgctataaacatcctgtgatacacgggacagacgtatccagcctaaaacgtcagtagtgttgagggtgagaaaccctgggcttattaaggcaacaagcaacatattaatagcaacaggagaaaacatgcatttaaattttttttggccaggcgtggtggctcacacccgtagtcccagcacttcggggggcccaggtgggcggatcatgaggtcaagacatcgagaccatcctggtgaacatggtgaaaccccatctctactaaaaatacaaaaattagttgggtgtggtggtgtgtgcctgtagtcccagctacttgggaggctgaggcaggaaaatcactttaacctgggaggcggaggttgcagtgagctgagattgcactactgcactccagcctggagacagagcaagactctgtctcaaacaaacaaacaaacaaacaaacaaaaaacaaaattttttttccacaaatgtgaagtagtctagatgagatacgctcttcctgagatgataaagtgaggtctaagtgtatttattaattcttttgaggagggtgttaggtgctaaaggcagcacgtgtaaggtgaaaattgcgtatagccaaaatgaccctggggcttattctctctctctctctcttttttaataaacagctttgttgagatataattcacataccatatgatgcacctataaagtgtgcaactcagtttagtacattcagaattgtgcatgtctcctgtctccaggtaggcaaatcttagcacctcggcccttcttagattttattttttagagatgggggtctcactatgttgcccaggctggtcttgaacttcttggccttcctcccatcttggccttccagagtgactatattcaatattcaaagtgactgtagtcaacattagatatttttatcaccctacttacttgtttttatttaagacctggtgtggtgtgtgcctggccttgtgatcacaaatgctagttacactgaattgacattttgctgagactcgttctgaggtccattcatagatgccctaggtacttcctgattacttgccacaccccaggaattctgcacagtgagtggggagtgacattttgagggacagcatcagtacattcactgcgctaaagaaacagtctggggagagtgagacatcgaaaaaataacatataaaataaacatctgatggagacataggaagatgccaaccttcaacaatgtttgacttggagcaggggttggcatgctttttctgtgaagggttaggtagtacatattttaggtctctcaggcccaggggcaaatagtctttcttataatatgtatttaaaaattggccaggcatggtggcttctgcctgtaatctcagcactttgagaggccaaggtgggaagattgcttgagcccaggagttcgagaccagcctcagcaacaaagtgagactctgtttgtattagtctgttctcacgctgctataaagaactgcccaacactaggtagtttataagggaaagaggtttaattgactcacaattccacagggctggggagacctcaggaaacttatactcacagcagaaagggaagcaaacatgtcctccttcacatggtggcaggaaggagaagtgctgagcaaaaggggaaaagccgtttatcaaaccatcagatcttgtgagaactcactataatgagaacagcatggaggtaactgcccccatgattgaattgtctctcaccgggttcctcccacaacacatggggattatgagaactacaattcaagataagatttgggtggggatacagctgaaccatataattccatggccaaatgatatcgttctgcccctcccaaatctcatgtcctcacatttcaaaacacaatcatgcctttccaagtgtcacccagagtcttagctcattccagcattaacccaaaagtccaattccaaagtctcatctgagacaaggcaagtcccttctgcctattagcctgtaaaactgaaagcaagttagttacttcctagatacaataggagtacaagcattgggtaaatacacccattccaaatgggaaaatttggccaaaatgaaggggctgcaggccccatgcaagtctgaaatccagtggggcagtcatttcttaaagctctgaaatgatctcctttgactccatgtctcacatccaggtcatgcttatgcgagaggtgggctctagctatggccttgggcagctctgcccctgtggctttgcagggtacagcccccatcaaggggctttcacgggtttgtgttgtgagtctgcggcttttccaggtgcacggtgcaagctgtccatggatctaccattctgcagtctggaggatggtggccctcttctcacagctccactaggcagtgtcccaatggggactgtatggggcctctggccccacatttgccttctgcactgccctagcagaggctctccatgagagctccactgctgcagcaaacttctgcctggacacccaggcatttccatgcatcctctgaaatctaggtggaggttcccaaaccttgattcttgacttttgtccacaggctcaataccacatggaatctcctaaggcttttgaggcttgcaccctctgatggcacagcccgagcagcattttggccccttttagccacagttgaagcaactggaacaaagtgtaccaactccctaggcagcacacagcaggggggccctgggcccggcctatggaatcattttttcctcctagacctctaggcctgtgatgggaggggctactgcaaaggtctctgacatgccctggagacattttccccattgtcttggtgattaacatttggttccattttacttatgcaaatttctgcagcaggcttgaatttttccccagaaaatgagtttttcttttccgtcacatcatcacccttccaatgtttcaaacttttatgctctgcttcctcttaaacactttgttgcttagaaatttcttctgacaatcatctaaatcatctctctcaagttctaagttccacagccctttagggcaaaggcaaaatgctgccactctttttgcttaagcatagcaagagtcaccttggctccatttcccaagaagttcctcatctccatctgagaccacctcagcctggacttcattgtccatatcactatcagcgttttggtccaagtcattcaataagtccctaggaagttccaaactttcttacatcttgctatactcttctgagccctccaaactgttccagcctctgcctgatactcagttccaaagttgcttccacatttttgggtatctttacagtagcaccccactcccagtaccaatttactgtattagtttgttctcacgctgctataaagaactgcccaagactgggtagtttataaagggaagagatttaattggcccacagttctgcagggctggggaggcctcaggaagcttgtaatcatggtagaaggggaagcaaacacgtccttcttcacatggcggcaggaaggagaagtgctgagcaaaagtgcttcttttgctgagaagtgttgagcaaaatcagatcttgtgagaattcactgtcacaagaacagcatggaggtaaccacccccatgattcagttacctcccactgggtttcttccatgacatgtgaggattatgggaactgcagttcaaaatgagatttgggtggggacacagccaagccatatcactgtctctaccaaaaaaaaaaaaaagccaggtgtggtggctcatgcctgtatcccagctactcatgaggctgagatgggaggattgcttaagtccaggaggttgagactgcagtcagctatgaccacaccactgcactccagtctgggcaacagagtgagacgctgtcaaaaaaaaaaaaaaaaaaaaaaaaaaaaaaaaaaaggaaatccattcttagcctgtgtgctgtacaaaagcaggcagcaggctgaatttggcccacaggctgtggttcgccaacttatgacctatacaaatggcaattcatatggttcatcctagcgataactgtacatggtgtattagatactatatagcatgttcatatcaaatgtcatataatgtataaggtaacatatacagcataaaatagtgcctgagaaatatttgatgaaaaaatctgataagtacttagcaggcacagtacaaagtaccatgaagttgttaaatgggggatcagggtgtttgagaaaggggtggggagataggtgggcctccctcaagaaggaatgtttcaactgtgagctgaaggatgcccctgcattgcatgtcagggcagtgatggggagaaagactccaggtagagggaacccactctgcaaaggccctgagtcatgaaggggtccctggaacagtgagttggggctgaacccacaagctgcagttgtggggattgtgatccatcctgagagctctgagaacctggaatagttttcagcgcagtgtgaagggactggggctgtgttttgaagatatcccctgtctgcagttgggaggggagtcaggaaacctatttggaggctggggttttcacccaggtcatgcagataagatttattaggtgtggaatgaactgagcaaatcacatgtcttctaatggtacaccacacttttttttttttttttttttggttttgagacagtcttgctctgtctcccaggctggagagcaatggcatgatcacggctcattgcagccttcacttcccaggttcaagcaatcctcctacctcagcttccagagtagctgggactacaggtgcccactaccatgcctggctaattttggtatttttattggagacggggtttcatcatgttggccaggctcctctctaacttctgacctcaagtgatttcgcctgcctcagcctcccaaagtactgggattacaggtacaagccaccgcgcctggcctttagtgatattttaaagactaaattcccttagagatgcctgggtctgcatttattgctactgttctgtttctcactgtgtgtcttgaggtcatcaaaagtaacctgggccttttcccttgttttctgcctcctctaggcttatgagccattaagcaaagctggattggtgtgtgggtcaggctcttcatgttttctttagcttaataagcagtttctaagggaactcattgtgtcattgtttagaatagcaaaagatgggcagcctcccaagtggcaatcagtaggggctgggtgaatacagtgggttccaccccttccgtggtagggtgggatgcttgcagaaggacataagacgaggaagccctttgtgcacagatgtgcggcagcctccaaggtccagtttttaagtgaaaacgtggagatccacttggtatatttggtatgttacctctgtgtaaaaaagcagacaagtaagaattacgtagttgtatttgctgtatttgtaagaaattccagagggataaatgagaaactaaaagaggcaattgcatttgggcagagtaactttttattgtttaccttgatatatacgtttttttttttttttttgagatagagtctcgccctgtcaacaggctggagtgcagtggcgtgatcgtggctcactgcatcctccgcttcccagtttcaagcgattctcctgcctcagccttctgagtagctgagattacaggtgtgtgcgccaccaagctcagctaatttttggtatctttagtagagattgggtttcaccacgttggctgggctggtctcgaacccctgacctcgtgatctgcccaccttggcctcccaaagtgctgagattacaggcttgagccaccgcgcccggcctatatatgtattatataaacatatgcacacgcatgcatacatacacacatatatattttttaaaaattgagtcatggccaggtgcagtgtgggtcacacctgtaatcccagcactttggcaggtgaaggtgggaggattgcctgagctcaggagtttgagaccagcctgggcaacatggagaaaccccttctctacaaaaatcacaaaaattggctgggcgtggtggcatacacctgtggtcccagctgcctggaaggctgaggtgggaggattgcttgagcctggtaggtagaggccgcagtgagccatgatcacgccactgcactccagcctgggtgagagagtgagactctgtcttaaagcaaaaacagagtcatatatttcctattaaggtgaaatttaaaaaataaattcctatattccatcatccccagcttctgccattctaaagcattttcctaagcagctccactgtggatgtagcgggtatttcagaaaggcattagaaatgccctgggagggcagaacccggggcttcactggaggtgctgttgggctcagtctgatgtcaaggcagggacatggcaaggnnnnnnnnnnnnnnnnnnnnnnnnnnnnnnnnnnnnnnnnnnnnnnnnnnnnnnnnnnnnnnnnnnnnnnnnnnnnnnnnnnnnnnnnnnnnnnnnnnnnctgagtgactctaaggatccctctattcatcttcaaatcactcagtactcattaaaagcttctcacaactcccaacactgcccaacttgcatgatcttcttacttgtcacgtcatttctcttgtttggttgttagtatatctggctaggcacagtagtttgcacttgtaacctcagcatttgggaggccaaggccaggcaggcatcacttgagcccaggcagttcaagcacccagcctgggaaacataatgataccctcttttttaataaaataatttaaaattattttgaaaaaatttaacaattaaacaacaatccatccaggtagagactagctatgaccactcacttcctaattgagcagatgtagattcaaattcaggccttaaccccatgtgaacttgggcaagtcacttaatttctccaagcttcagtctcctgataagtaaaaagagtcagaaaagctggacacggtggctcatgcctgtaatcccggcactttgggaggccgacacgggtggatcacttgagcccaggagttcaaaaccagcctggacaacatggtgaaacccgtctctactagaaacacaaaaattagccaggcatggtgaactcgcctataatcccagctactcagtgggctgaagcaggagatcacctgagccttggaaggtagacactgcagtgagacataatcacaccattgcactccaacctgggcaacagagtgagaacctgcttcaaaaaaaaggaaggccaggagcggtggctcacgcctgtaatcccaacactttgggagaccgaggcgggcagatcatgagatcaggagttcaagaccatcctggctaatatggtgaaactccgtctgtactaaaaatacaaaaattagccaggcatggtggcatgcacctgtagtcccagctactcgggaggctgaggcagaagaatcacttgaacctgggaagcagaggttgcagtgagcccagatcgtgccactgcactccagcctggcgacaaagcgagactccggctccacgcccgcacgcaagaaagaaagaaagaaagaaagagacacgagagagagagagagagagagaggagagagagagagagagagagagagagagagagagagagagagagaaagaggccgggcacagaggctcacacatttaatcccagcaatttgggagaccgaaatgggaggacagctggagcccaggaattctagaccagcctgggcaacacagtgagaccccatttcttttatttttctttttctattttttttttcttttgagacggagtttcactcttgttgcccaggctggagtgcaatggagagatttcagctcaccgcaatctctggcctcccgggttcaaacgagtctcctgcctcagcttcccgagtagctgggactataggcgcctgccaccacgcctggctaatctcgtatttttaagtagagatggggtttctccatgttggtcaggctgtcctggaactcccaacctcaggtgatccgcccacctcagcctcccaaagtgctgggactacaggcgtgagccatcgcacccagcgagaccccatttctttaaaaaaatttttttggctgggcacagtggctcacgcctgtaaacccagcacttcgggaggccaaggtgggagaatcatgaggttaggagatggagaccatcctggctaacacggtgaaaccctgtctctactaaaaatattaaaaaacaaattagccaggtgtggtggcgggcacctgtagtcccagctactcaggaggttgaggcaggagaatggcatgaacccagaaggcagagcttgcagtgagccgagatcgcagcactgcactccagcctgggagacagagcgagactccgtctcaaaaaaatataaaaatttttttttaatttttttaaaagtcaggaaaacacatcatttggaagagttctggagaggattcaatgggacaatgtgtgacaggtgctgatacagtctagagacaataaaccgtagtagcagatactaatagttgataataatcaccactgccaccaccactgtattgcccagagataagaagtctaaaggacaaagaaaagttgtcctttcaagcaagaaagtaagctacagaagaaaccagagagcatttaaggacaccggaactccagggaaggagaggtcaggaaacgctgagcaaaggaaggtgtttcccctgcagaaagcaaattgaagagcacaggctagcttcctgctcagagccagatggccagcccagacccaaagggcggctgtgggagggagcagaaggaagggaaggaaggcatgacgagaggaaatctgactctgaccatgaactatgactgttacagaaagcagccaacacgggtcacccctgccatccacccccacatcacctccatcacagcccctacagcggccaacagcataggtcacaaagctaagatcatctgaggaccgggcacagtggctcacgcctgtaaacccagcactttgggaggctgaggcgggaggattgcttgagctcgggagttcaagaaaagcctgggcaacaaagtaagaccctgtcttcaccaaaaaaatttaaaaattatccaggcgtggtagtgcaggcctgtagtcccacctactcagaaggctgaagtgggaggatcttttgagcctaggggcttgaggctgcagtgagctttgatcgtcccactgcactccagcctgggtgacagagtaagagactgtctcaaagaaacaaagtatcgggactgggcgcagtgggtcacacctgaaatcccagcactttgggaggctgaggagggcagatcacttgaggccaggagttcaagaccagcctggccaacatagtgaaaccccatctctactgaaaaagaaaaaaaaaaaacattagccagccatggtggcaaatgcctgtaatcccagctagtcgggcagctgaggcacaagaatcgcttaaacccaggaggtggaggttgcagtgagcagagatcaggtcattgtcctccagcctgggtgacagagcgagactctgtctcaggaaaaaaaaaaaaaaaaaaaaaaaggtatcgaggcctcctggatgttccttaccggcagggaccctaatgtgtccttctttactttaacaactccaggaggtaagaagtgcgactctcactactggaggcttctgggaaaaacggtgaataatgggcaatacctaaaggctcaaggaagggacgattccctggcagtctgcaggccacttgctgttcccaactcaaagaatcacagctacccgaggctgcttcctaatctagggaaatccagccaggcccaccacgctctgagcagaatcagaaggacccaactctccagacacacaattcagccacaagagatgagtcctgaacacggtcaccggtcactgcactggcccagggcctgccctttggggaacctggcccacagaaatctttacagagaaagcgcaagtcggctgggcgcggtggctcacgcctataatcctagcactttcagaggccaaggcaggtggatcacgaggtcaggagatcaagaccatcctggctaacatggtgaaaccccgtctctactaaaaatacaaaaaaattcaccaggcgtggtggcacaggcctgagtcccggctacgtgagaggctgagacaggagaatcgcttgaacccaggaggcagaggttgcagtgagccgagattgcaccactgcactccagcctgggcgatagagcgagactccgtctcaaaaaaaaaaaaaaaaagagaaagcgcatgtcctccccagctcccggctccctccaacagaggcttctccttgctggacacttcaccagcttgatcaagttgtgtctccatgccctcagccctgacactcaaagagttggggaccccgtccaagtccgagtggcccctgacctttgtgtgttcataaaattcctgttgcatagcgtcatgttttctgggctgaatgatgatgactaaggcactaggcattgatctaagtcttcccatacaagatcctggtgctgacctcctttctgtacatgaccctggccttgacctgccttcctggttcagccctgattatcatggaagtcctcgtgcaccgggcagctcactaactttgccctacacccttactgctcccatctggatggcacaggttctgcacagatgctccaccagggcctgcagggataaggcaagcaggcctgcagggataacgcatgcagccctgccagggacccagccagccaactccaggacaggagggaaggccacagagaggatggggcagacaacaggcagaaaaagtgattatgaatctcaactgccactgatgggaggtaatgaggacctactgtgtaccacaagttccactgaggcctgagcatccactcccaattcaaccatctcaataactcacaaccagctgggtgcagtggctcatgcctatatttcccagcacttgaagaggcagaggcaggaggatagtttgaggccaggaatttcagatcagcttgggcaacacagtgagactgtatctctacaaaaaaatttaaaaacttagctggccgggtggaggggttcacgcctgtaatcccagcactttgggaggctgaggcgggcggatcatgaggtcaggagttcgagaccagcctggccaacatagtgaaaccctctctctactaaatgtacaaaaattagccgggcatggtggcgtgcgcctgtagtcccagctactcaggagactgagacaggagaatcgcttgaacccaggaggtggaggttgtggtgagccgagatcaggccactgcactccagcctggacaaaagagtgagactgcatctcaaaaaaaaaaaaaaaaaaaaaaaaacttagctgggcgtggtggtacacacctgtcatcccaacactttgggggaccgaggcaggaggatcacttgagcccaggagttcgagaccagaggtggcaatggagtgagactccccaccttctacaaataaaaaaatttaaaagtagccagatgtgatgacgtttgcctttagtcccagctactccagaggctgacgaaggaggatcccttgagcccaggagttcgaggctgcagtgagctatgactgcaccaccgaactccagcctaggtgaaagactgagaccctgtctcaaaaataaataaataagtaacttgcaacagtcgggttcttattgctcagtggacatttatcagcgactactaccatgggccaaggtcatgtggaagtaaaataaagtctccactctcacacaatttcactttatgcaaagcggccaaaactaccaacagctaaaaaaaaacaactctatgtatgcccaatgggagcaaatggcttgaagaagaagaaagtgggtgaagcataatggtgggtgggcaggtgctagttctttatcaggtagacagaaagggcctctgggccaagatgacatttcagcaaagggcgaaaagcaatgaagaaacctgtgccgccttcttctgtctatagaaagagtaagagggaagattcattagttgcatcagccaagcaccactctaagtgtttcacattacatttcatcctcacacacaactctaggactcaggtactataacgtaacccattttacagatacagaaccaggcctggtcatatataacctgcaagcagcatacacagtcaggaatttgatgtttcgtttgttttttgagacggagtttcgctcttgttgcccaggctggagtgcaatggtgtggtctcggctcactgcaacctccacctcccgagttcaagcaattctcctgcctcagcctcgcaagtacctgggattacagacgcctgctaccacgcctggctaatttttgcatttttagtacagatggagtttcaccatgttggccaggctgttgtcacatttctgacctcatgatctgccctaatcccagctactagggaggctgaggcaggagaattgcttgaacccaggaggcggaggttgcagtgagtcaaaatcacaccactgcactccagcctgggcaacagagcaagacttcatattgcaaaaaaaagaaaagaaaaaaagaaagaaaaaaagctaattaatctgcagggggtaggcctgaaaccagggagaggaaggcaactactattttttgttgtattatctttcgtactgtttgaattttctcctctgcatgatttctaaaataataataagaaagctagttcgcacttcaaataaataaatagcagcaggaattgaagggtaggacatttctaaatgctgagttggaaacaaagagaaagcatgtatttattgggtgccaataataacagccagagtgatcacgccaggcacagtgattaagtgcttcccaagcacagtccatttaagctttccaacagccctacaaagtcaggactattaaaactctcccctttcctggcaagggctctgaggtccagagagtttatgtaaattgcttgggctcgtcaacctagaagaaacagggccaggatttgaacccactgagagtctgacactgagatccaccacctctaaaccacgtgcttgaactctaaggccttttggtttgtttggtcagctggttttgttttttgagacagggtctcactctgttgcccaggcttgagtacactggcaccatcacagctcactgcagcctcgatctcctgggctccagcaatcctcctgcctcagcctcccaagtagctgggactacctggcacgcatcaccatgcctggctaatttttgtatcttttgtagattcagggttttaccatgttgcccaggctggtcttgaactcagtctgcccgcctcggcctcccagagtgccgggattagaggtgtgagccaccatgcccagccagaattctaaggtgtttgcaaggtacatggcagacagatggagcctgaggtcgcttggaggcaagatctccagggccggagatcaagtgaatggcctcaggcctcacagattccaaattcatctccctagagcagagaagcaagattttgactcagacatggaaacattctacaactcttcccacccacccacccccgcatgtgagcagtgcagggtagtggttaacaaaacaaggttccgggtctaggttcccgtctccaccacttacagatgtgtgccctcaagcagggcttcttcaacctcagaaccgctggtatttgagcccaaataattcttggttgtcgggggccatcctgtgcattgtaagatactgagtggcgtcgctggcctctgccactagatgatagtagcactccccacctcctcaagttatgacaatcaaaactgtctctagacattgccaaatatctccagagaggcaaaaatcatccctgctgccctaaagcaagtcagttcacctcaccaggccttgatttcttcatctgtgaaatgggactaattctagaacccacctattacagagtttagagagttatcaggagggttcaatcaggtgacccaagtgccaggttgcaggagctggtgttcccggcagccaagagacggattaacacagataagtgcagggttcctgtcatgcattcattcattcaatctatcattcgatgactgtttattgagcacctactatatgcctagacctgggctagtcacaggcatgggggaaaatcagaaacgatatctctgtcctcttaagactcatagtccatcaaagatgaaagctcacagataagaacataatgacaaagagcagtacctgctgtgaaggaaagagcaggggtgtcaggacaggaagcaccagagtggcggtctgggcagatgacatcctagcagactggaagggtcaggaagagctggctgtgcaaagatctcgggaagcacataccaggcagaaagatggcacaggcaaaggccacagtggggtggggtggggggaggatatggctgcaccaatgagctaggacccaagattgggcgggagaagtcaccaaaggccaccacatagccaatcttggagccatggtacagagcatggattttttgttctaattctcacaggaggccctgggagtgcattaagcagggtcatggcatcgcctaattcacatattaagacagtggtccctggccaggcacagtggctcacgcctgtaatcccagcactttgggaggccgaggcgggaggatcacccaaggttaggagtttgagagcagcctggccaacatggtaaaaccccgtctctactaaaaatacaaaaattagccaggcacggtgccattgtgcctataatcccagctacccaggaggctgaggcaggagaatcgctggaacctgggaggcagaggctgcagtgagccgagattgtgccactgcactccagcctgggcaacagagcaagaatccatctcaaaagaaaaaaagacagccatcccctttttggcagcaaggataggttttgtggaagacgatttttcacagacagggtaggggatgattcgagtgcattacatttattgtgcactttatttctatgattacattgtcatatataatgaaataattatacaactcaccattatgtagaatcggtgggagccctgagtttgttttcctgcaactagatggtcccatctcagctgtgatgggagacagtgatagatcatcaggcattgcattctcaaaagaagcacacagcctggatccctcgcgcacacggttcacagcagggttcgcgctcctatgagaatctaatgccacaggtgatctgacaggaggcagagctcaggcggtgatgcaaaagatggggagcggctgtaaatacagatgaagtctcacacgctcgcctgccactcacctcctgctgtgtggcctgtggcctggttcctaacagggcatgcatgaactggtgccagtccgtgctctggggattggggacccctgtattaagagaccctaggagaagatcctaggggagatgggaaaggaggctgcagccattgtcaaggcaacgaaaggggtgacagagaagcatggttcaaggccactgcggagtcggcgtgtatggccttagcacatttactcctccccgtaactctaggagaaaggtgaggaccagcaaggtgaaggaacagcccataagtggggatgcaaggatgtctgacttagattccatcccgagacaggcacagtgagtacaggtgctgctttgtgacaccgcagagtctacattcactgatccacctaatgaatgttgatggccctgcagctccgcccgcagtgggggtcctgcttggcgacactgagctctgtcctgaagcccccagaagagccgagaggtgccatccttgcggaacttcactcaaccctgagctcgctggggctactcttcttttgcagaacaagccctgtacttttcatgtatattgcaagaatgaaaggggtctggaatggcgctctgttttgccaacggaaaattaagaaaagggaaagaagagaaataagattcaccccaccacatacccatagccccccgcaccccagccacacacacacacaaagcttccctgcgatttagaggcacaggtggccctagaccctgagacacccaaattccactcccttgagctggacgctaaacgccaggaggcactagcactgctgaactagagacgacagcagtgatctcctaatctcagccacacatgggccctgaagagatatctgcactcccgtgttcactggagcgtcactcacagcaaccaagatggagacaactaaatgtctatccgtggtcaagtggacaaagaaaacatgatctatacatgccatggactatcgctcagccttaaaaaggaaagaaatcctggccgggcgcagtcgctcacacctgtaatcccaccgctttgggaggtcaaggcaggcggatcacaaggtcaggaggtcgagaccaacctggctaacacggtgaaaccccatctctactaaaaatgcaaaaaaaaaaaaaaaaaaattagccgggcgtggcggcaggcacctgtggttccagctactcgggaggctgaggcaggaggatggcgtgaacccaggaggcggagcttgcagtgagccgagatcgtgccactgcactccagcctgggagacagagcaagactctgtctaaaaaaaaaaggaaagaaatcctgccatttgcaacaacatggatgcgcctggagaacattatgctaaatgaaataagccaggcacaggaagacgaacactgcaagatctcactcacatgtgacatctaaaaaagacaaactcatagaagcagagaacagaatggtagttgcaaggagctggtggtgggggaaacagggaggtgttggtcaaagcgtataaagttttggtcatacaagatgagtcagtcagtcctacggtctactgtacagaatagtgtctatagctcacaatactatattgtatacttaaaaatttgctgatggccgggtgtgatggctcatgcctgtaatcccagcactttgggaggccgaggagggtggatcacttgaagtcaggagttcaagaccagcctggccactatggtgaaaccctgtctctactaaaaattagctgggtgtggtggcagacgcctgtaatcccagctgcttgggaggctgaggcaggagaatcacttgaacctgaaagacagagactgcagtgagctgagatcgcaccactgtactccagcctgggtgacagagccaggctctgtctcaaaaacaaaacaaaaaaaaattgctgaatggtgccaggcacagtggctcacacctgtaatcccacctacttgggaggctgaggtggtaagatcgcttgagcccaggagtgggaagctgcagtgagacgtgattatgctaatgaactccagcctgggtgacagagtgagaccaagtctcaaagaaaaagaaataaaaataaaaccagagccctgtctaagcacggactgcataccaggcactgcgttcaggtttcatgtacatcgctccattttatcaccctagcagtctatgaggaaggtactgtaatgattcccacttttacagagaggaacacagagacaaacaggtgagaagatggcccgcgagtcacaggggcaggaccgtcctggattcaaaccctagcaactcttctgcacaaccaaccaaggaacagacggggcttggagggacgaaaggcaagacgacagggtgctcctaaatgccacactcagaaacaacgctgcagaggggtagctcagaagccaagggaagctgagaaaaggagtgcaagaggcccgtggttaggtcagggcacccgctgggcttctgaacattaatcctgtttagagagacagcatgtggccttcatttccccaccgcactcctgaaaacatctggagaaaggctaaagtctcccagccccgacacagcaggaggcaagcacggctggcaggcccatgaggtgagaggaaggcggctgaagccagcatcgcgtgggcagtgacgcgcccctggcatgctgttggctgggctgcaccccaccctgccccctaactcagcagagctaagaataaagcccagtaacatcacaggggcaatttccagacttatccccatcacccaggaaggcaggggcacggccatccttgctctatccaggcgggtaccacaaatcctcacgtccaagacacagaactgaacacagttacatgcaaaactaattttttttttttttttttttttgagacagagtcttgctctgtctcctcggctggagtgtaatgtcatgattatagctcattacagctttgaactcccaggctcaagtgatcctcccacctcagcctctcaagtagctgggactagaggtgcacaccaccaagcctggttaatttttgtatttctttccagagatggggccttgctatgttgcccagtctggcctcaaactcctggggctcaaatgatcctcccacccagggctcccgaagtgctggatgagccactgtgcccagtcctaagaatcctgtcttaacagggcttcagtgttgttaagcactaaaaagaaagcagaggtcaggctgcccatcagtgcccaaatgtcagcagcaagcatcttgttccaacctgctttcaccccaactctcccaagcaccatgaggcctctcgtggaaggcccgtcctatgaagctgacactcaccctcgttttctccatccaaccctggctatctttgcaaggttgctccccagccacttcctctcctcttatcagactctcatgtttcaccaaataaatcccttagtcatgttccagggtcttgtgaggggtcaggcatgtgctgggcatagggatatgtctggggacactgcagtaacaggacagacagcattcatccatttacagagcacggttcctagggctgagggcccagcagtgaacaatagggaccaagggccggccctcctggagctgacagcctaaagagaagagacagatggtttagaaaggagaggatatgaagacatgtgtgatgaaaaggactcagagaagagggcaagccttgctgaggacgggtatttaaatacaggattgagccaggcacagtggctcacacctataatcccagcactttgggaggccaagacaagtgggtcacttgaggccaggagttcaagaccagcctggccaacatagcgtggtagtgcatgcctgtaatcccagctactcaggaggctgaggcacgagaatcccttgaacctgggtggtggaggttgcagtgagctgcgatcacaccaccgcactccagcctgggtgacagagcgagactccatctcaattaaaaataaataaacaaatacaggatggaaggaaacagaggagtaaaccaaatggccatctggaggaagggcacaccaagcagagaaaacagtcagtgcaaaggtcctgaagtcagaccaggcctggcatttctgagaaaccgcagagaggccaacaggtctgaagaataacaagcagtgaagacagcgaggaaggaagaaggcagggaggagacagtcagtgcgggacgcacaggccaccgcagggattctgactttcacgcagggtgacctgaggagcatggagttgatgtgccgtgatctatgtttcaacaccatggttctcaagtgggggcaagtttgtcactcaggggacatgtgacaacatttggaaacatcctgggttttcacaacttaggaagagggtagtgctattggcactctgtggacagaggccagggatactgcttaatggccacaatacataggacagcccccacgacgggaaatatctggccccaaatgtcaacagtgccaaagctaagcagccctgtttgaacagaatccctccctgaccaagcttctagtccacatccccaacacacccctcgtcaggcagatggggcttcagctcctcaccctgtaatactaggccagcaactaaacctcagtttccgcatctgtaaaatgggaatactaacattatgcaaataagcactttgttaaacatgagccagagcacacagtaggtgctcaataaataccactactagtaaaacttccagatccacttcttgctataatatccctccacattctctctttttctgacacagggtctcgttttgttgcccagactggactgcagtgccatgatctcagctcactgaaacctccaccttctgggctcaagtgatcctcccgcctcagcctcctgagtagctgggactacagacacacactatcacacccaggtaatttttctatttttaggagagatggggtttcgccacattgtccaggctggtctcaaactcctgagctcaagtgatccacctgcctcagccttaggattacaggcgtgagccactgcacccggcctccttccacattctctagcctaaccaaatgattgattgtgtcattcaacaaagatgtactgagcccctactatgtgcctggaactaagctgaacaggtgcagtacacagaatagcccgtaaagatgcctacatccccgtccccagaacctgagtctcttacctttcatggcaaaagggactctgcaggtatcattaaggactttggaatggggagaatgtcccagatcagaggtccccacgctttttggcaccagggatggatttcatggaagacagttttgccagggatggcggggggtggctttcaggatgaaactgttccccctcagatcatcaggcattagattctcataaggagcacacagcctaggtccctcgcatgcacggttcacgttagggttcacgctcctgtgagaatccaatgcagccactgatctgacaggaggtggaattcaggtggtaatgctggcttgcccgccactcagctcctgttgcatgactcagttcctaacaggccacagactgctcgctactggttcatggcccaggagttggggacccctgtcctagatgatccaggtgggcccaatgtaatcacagggaattataagggacaagaggacggtgggaatatctgagtcagaaaaggagatttgaggcagggcgtggtggctcatgcctataatcccaccactttgggaggctgaggcaggtagatcacccggggtcaggagttcaagaccagcctgtccaacatggtgaaaccccgtctctactaaaaatacaaaaattagccaggcatggtgacatgcacctgtaatcccagctactcaggaagctgaggcaggagaatcacttgaacctgggaggcagagactacagtgagctgagattccgtctcaaaaataaaaaaaaagtaaaggagatttgacaacacaagcaggggtggagggacatgaaaccacgaattgaggaagacaggtggcctcttgatgctggacagggccaggccatggattctccctgcaagcttccggaaagaacaccagccgtacattttggacctctgactcccgagaactagagtgatgtgtgttgttctcagtcaccaagttgatggcaataccagcaataagaaaccaatagagactgggcacagtggctcacacctgtaatcccagcactttgggagcccaaagcaggaggatcacctgaggtcaggagttcgagaccagcccgaccaacatgaagaaaccccgtctctactaaaaatataaaaattagctgggcatggtggtgcacacctgtagtccccgtcttctcccgagcctgaaacaggagaattgcttgaacccaggaggtggaggttgcagtgggccaagatcgtgccattgcgcccgggtgacacagcaaggctccgtctcaaaaaaaaaaacaaaaaaaaaagaggctgggtgccgtggctcacgcctgtaatccccagcactttaggagttcaaggcaggcggatcacaaggtcaagagatcgagaccatcctggccaacacggtgaaaccccatctctannnnnnnnnnnnnnnnnnnnnnnnnnnnnnnnnnnnnnnnnnnnnnnnnnnnnnnnnnnnnnnnnnnnnnnnnnnnnnnnnnnnnnnnnnnnnnnnnnnncctagtgtcccttttttgtctaaacctccttgtataagtacccattcagatttttggtgaatgcaccccaatgacatgttcgtgatttgtgtttaattcagggccccaatgacacgtttgagatccaatgttcttggccaacattagtggagacccctcatttcgtactataacaaaagtgtcctgttgttgtgcttgtatttgtctgagatcatatctctctccctttgtcccaggttggagttcggaggcatgatctcagctcactgcaacctctgccttccgggttcaagtgattctcctgccccagtttcccaagtagctgggattaccaggtgcgtgccacggtgcctggctaatttttttgtatctttagtagagacggcgtttcaccatgttggccaggctggtctcaaactcctgaccttgtgatccacctgcctcggcctcccaaagtgctggggttacaggcgtgagccaccatgcctgcctcaacaaaacaattttaaagattagctgggcatattggcacacacctgtggtcctagctactcaggaaactgagataggagaattgcttgagccccagagttccagactgcggtgaattgtgtacgattgcaacactgcactccagcctgggcaacagaggtagaccctgtctctgaataataataataataataataataataataataataataacaacaacatatgttgatcaaagtcaagataggaagaaatgtcctagggagatgtaaatgttctataacttgatttggtggtagttatgtggttttaaacatatatatatatatatatatatatatatatatatatacacacacacacacacacacacacacacacacacgtacacacacatttatattttaaaattcattgagcttggctaggtgcagtggctcatgcctgtaatcccacccatcactttgggaagccaaggtgggtggatcacttgaggtcaggagttcaagaccagcctggccaacatggcagacccgcatctctactaaaaatacataaattaggtgtcctggtgcatgcctgtaatgccagctactctggaggctgcagcaggagaatcacttgaacccaggaggcagagattgcagtgagccgagatcgtgccacggcactccagcctgggcaacagagtgagactccgtctcaaaaaaaaaaaaaaaacttcatcaagaggacatttaaagttgctgtactttgctctatgaaagttaaactcaattaaaaaaatttttttgagctatgatcttgctcttgctctgttcttcaggctagagagcagtgggtgctcactgtagcctcaaactcttggactcaagcaatcttcctgccttagccccccaagtagctgtgactatgggggacaccaccacgcctgactaacattttttgcaatatttatgtaaaatgggatctcactacgttacccaagttggtcttgaactcctggccgcaggcgaccctcctgccttagcctcccaaagcgctgggattacaggcatgagccactgtgcgcagcctcaattaaaatttttaaaatagaaaataaataaacgagagtcgggcacggtggctcacgcctgtaatcccaacactctgggaggccgaagcgggtggatcacctgaggtcaggagttcaagaccagcctgaccaatatggtgaaacaccgtctctactaaaaatacaaaaattagccaggcatggtggcgcatgcctgtaatccaagctactcaggaggtggaggcaggagaatcacttgaacccaggaggcagaggttgaggtgagccgagatggcgccactgcactccagtctcagagacagagtgagactccatcaagaaaggaaagaaagagagagagagaaagaaagaaaagagagagagagaaagaaagaaagagaaagagcgagaaagacagacagcgagaaagaaagaagggagggagggaaggagggaaagacaaggaaagaaagaaaagcaagaaagaaatttattgcgagtctcctgtgtgccggatactgtattaggtgctgtagacacaggagtgaccaaaacaaagaaggaagtaattatagaccaaaccaattagtctaccattttccaaaagcggaaactgggtttagagggaagaagtaatttgttgcagatccagcagctgggatgtggcagagataaggctcagctctgctcctaaccaccaagcctctctgtgcaactctttcagccacaggctcaaaccaccccctttgccttatttctaagccccttcctccccattaggggctctcacaatgtaacaaacccttagaccaacagactcggccctgcatcaaacccactcaactggcagcaaagtgattcatgattaaaatgcaagatttgaattttggatttcaagcatcactaaactgataggtagcacagagaatgccagagttcctctttttatttcctgtaatcacagcactctgttcttgttcatttatttaggagtacttttcactatttgtaatcattcatttatttatttgctccatatggcctcccctgccagactgagagcatttttttaattttatttttatttttttttaagatagagtctcgctctgtcgcccaggctggagtgcagtggcaggatcttggctcgccgcaacctgcatctcccaggttcaagcgattctcctgcctcagtctcttaagtagctgggactacaggcacacaccaccacgcccagccaatttttgtatttttggtagagacggggtttcaccatgttggccaggctggtcttgaactcctgacctcaagtgatccgcccgccttggcctcccaaagtgctaggattacaggcgtgagcgcctggcccagattgggaccttgaagctgctgctacctgtgacctgaacttctgtacctacctcctccttggtctccccacttcctttctttccccactacaatcagaatgcctcacagcagccccaggggacctagtaaagcaccctgcattgccaggcttccccatgggccntnnccctttagtccctttggtataaaatcctgctggaaaaaaatacaacaattctacttctaggtatatacctaaataagagaggccgggcgcagtggctcacgtctgtaatcccagcactttgggatcccgaagcaggtgcattacctgaagtcatgagttcgagaccaacctgaccaacaaggagaaatcctctctctactaaaaatataaaattagccgggcacagtggcgcgtgcctgtaatcccagatactcaggaggctgaggcaggagaatcgcttgaacccaggaggcagaggttgtggtgagccaagattgcaccattgcactccagcctgggcatcaagagtgaaactccgtctcaaaaaaaaaaaaaaagaagtagtgaaagcaggggtttgaacagatatttgtacacccatgttcacaacagcattattcacagtagccaaaaagtggaagcaggccgggcatggtgcttcctcccaccttagcttcccgagcagctgggattacgggttggcaccaccacgcccagctaatttttgtatttttagtagagatagggttttgccatgttggccaggctggtcttgaactcctggcctcaggtgacccgcccacctcggccccccaaagtgctgggattacaggtgtgagccaccatgcccggccacttcttttcttaccatttaattaccctaagttatatacaagtcatatactagatgtatttatggtgtcttgtaagtatgtaaatccttttctttttcccactagaatttcagctccatgatggagggatttagctatgttttgctcacttatgtactcagaacatttagaccaggggtcagcaaagtttttctgtaaagagccagattgtaaattttttaggctttgcaggccctgcagtctctgccaccatttctcacatctatcatgggagtgcaaaggcagccataacaaatacataaatgaggctgagcgtgatggctcacacatataatcccagcactttgagaggccgaggtgggaggattgcttgagcccaggagttcgagaccagcctggccaccagggactaacctttagtgagaaagtcaggtttattcatttattgaaaacaaggaaaggctggatggtggctcacgcctataatcccagcactttgggaggccgaggctgggggatcacttgaagctaggagttcaagaccagctggggcaacatggcaaaaccccatctccacaaacaatacaaaaattagccaagcatggtggtacatgcctgtattcccagctactcgggaggctgaggtgggaggattgcttgagcccaggaggtagaggttctactgagctgtgattgcaccactgcactgcagcctgggcaacagagtgagaccctgtctcaaaaaaaaaaaaaaaaaaaaaaggagggagagggacaccagagcaactgagcagctgtgggttgcttcaccaaacaaaggcaaaaattaacttctaaagtttagtaaatgtggaccactttgttcagggaacccttatctgaattgctgtgcctgggtatccaactgcccagatcctccaagcaagaagaaaaaatttcatttgtactgacatattttcttttcttttcttttttcttttcttttttttttttttttttttttttgagacagagttttggtcttgtcgcccagactgaagtacaatggcacgatctcagttcactgcaacctctacctcccagggtcaagcagttctgcctcagcctcccaagtagctgcaattacaggcacccgccaccatgcctggctaacttaagtgtttttagtagagacgggggtttcaccatgttggtcaggctggtctcgaactcctgacctcaggtgatccacctgccttggcctcccaaagtgctgggattacaggcgtgagccactgcacccggcctgcactgatatattttcaaactgcaaattatctatgatttcctggaacaaagtttctcagcaagtcagaaagcagtggttcacagtaggaagtcaccatggcacttgacagctgcagtgtccttgggagaaatattatttcctgttatctttgcagatatctttgtctggttttgaggggttttatttttttctggagaaggtcttgctctgttgttcatgctggagtgcagagtgcagtggtgtgatcatagctcactgcagcctcgaactcctgggctcaagcaatcctcctggctcaagcgatctgcctgcctcaggctcccaaagtgctgcgattacaggtgtgagccaccatgcttggcctgtttgtttgtttgtttctttgagacagggtttccctctgtcacccaggctggagtggcatggcatgatcagagctcacgacagcctcatactcctgggatcaagggatcttcttgcctcaaccttcctagtagctgggaccacaggcacgtgccaccatgcctagctaatttttgtatttttctttgtagatatggtgttttgtcattttgcccaggctggtgtcaaactcctgggctcaagcaatcctcctgccgcggcttcccaaagctccggaattacaggtttgagccaacatacctgacccattgcaggatgttttagcctcattcctggcccctacccaccaaatgccaggaatgtacctgcacacacaccctgacgttgtgacaaccaaaaatgcctccctacgttgccaaatgtcccctgggagggcaaactcgacctggttgagaatcattgctggataggacctcagactggaaagggacatgatttgatgtacagttttgaaaggccattccctgtgcccaaaatgtgttcccagccttagacgagtgcattgcattcatctggacacagtgattggttcaaagagatcatgtgacctagtcacagcccaagagtcacaatgtaatttgggctaagaatctggggaaagaagccaggtgcggtggctcacgcctgtaatcccagcactttgggaggccaaggcgagcagatcacctgaggtcaggagctccagaccagcctggccaacatgatgaaaccccgtctctattaaaaatacaaaaattagccggacgtgctagcgcatgcctgtaatcccagctactcgggaggctgaggcatgagaatcgcttgaacccaggaggcagaggttgcagcgagcccagatggtgtcaatgcactccagcctggggcaacagagtgagacttcgtctttaaaaaaaaaaaaagaatatggggaaagagagtcttgcttctgactcctctcactggaagtctgaggggacccaggtacctgaatgacatccatcgtgtccctgctacatgaagcctgaggctggggccaacaaacggcaagcagaagtcaagaaagggagaaaaacagactcatgatggcttcatttgcatcctggattcagccctacccatgaacgttttatttacaggatccccaaattcagactttcagatcttttaccaaaaatggcctaactgtcatgagagaccttgggcttgggcttcagtcttcctcatagctctgctctgcgtggactttccctgccaagcccaaatcctcaccttcaaattctgccagtttcagtgcctcatgcctgtaatcccagcacgttgggagggtgagggaggcagatcacttgaggtcaggagttccagaccagcctgggcaacataaggagacccctgtctttatttaaacaaaaaacaaaacgaatagaaaagagaccaggtgcagtggtggctcactcttgtaatcccaacactttgggaggccaaggtgggcagatcacttgaggtcaggcattcgagaccagcctggccaaaatggcaaaaccccatctctactaaaaatacaaaaattagctgcgcgtggtggtgcatgcctgtagtcccagctactcaacaggctgaggcaggataatcacttgaacccgggaggcggaggttgcagtgagccaagatcgtgccactgcactccagcctgggcgacagagcgagcctttgtctcaaaaaaaaaaaaacaaaaaaacaaaaaacaaaacaaaaaaccctgaaaatgtcaattatatatggaatatcagtagcacaatgtatggctgttgtaacatggtaccgaagtccaagatcaaaatgctggtagattcaagtgtctggagaggacctgcttttctagatagctgtcttttcactgtgccttcctatgataagtggcaggggatctctctggggtcctttttatttatttattattatttcaattttaagtggagatgtcgtctcactatgttgcccaggctggtctcaaaccactgggctcaagcgatctcaacactttgggggccttggtagctgaaccattacaagcgtgagccaccacatccagcctgggtcccttttataagggcactaatcccagtcatgagaactccactgtcaagacctaatcatctctcaaaggctcacctcctaataccatcaccttaggggttaggatttcaacatatgaattttgggggatataaacattcagaatatagcatggagactgtagtgagttaaaactgaaaactgcttagaattcagtttaaagaaaagttacactcctcccaccccataaagcaagtgaactgtattgatcccaaccacaaaaattagacattctagatgaatgtctttgagaaaatgaatgagagagggtccagatgtagcaagagacagagtagaagaaggagtgagaaatcaatgcaactatcaacaggagaattcaatgagaggcacttaagaatggtgagatccctggctggtcgtgatggctcacacctggaatgccagcactttgagaggctgaggtgggtggattacttgagctcagcagttggagaccagcctgagcaacatggcaaaaccccgtctctaccaaaaatagacaaaaaaaattagccagctgtggtggtgcacacctttggtcccagctactttggaagctgggaggatcacttgagcctgggaagttgacgctgcagtgagccacaatggcatcactgcactccagtctgggtgacagagcaaaaccctgtctcaaaaaaatgaaaataaaaataaaaaagggttgggtgcggtggctcacgcctgtaaccccagcactttgggaggctgaggctggcggatcacttgagatcaggagttcgagaccagcctggccaacatggcgaaacccagtctctactaaaaatacaaaaattagttgggcatagtggtgggtgcctgtaatcccagctactcaagaggccgaagcaggagaatcacttgaacccaggaggcagaggttgcagtgagccgagatcacgtcactgcctgggcctgggacagcctgggcctgggtgacaaagcaaggctgcgtctcaaataaaaaagaagaaaatttgagttgctcaacacacatgttcctatctgaggttgaatgaggccacaccctgacttcttgtttcagctgtcctattgtaaatgtcctttttttttttttctttttttgagatggagtctcactctgtcttccaggttggagtgcagtggctcgatctcagctcactgcaacctctgcctcctgggtttgagcaatcctcctgtctcagcctcccgagtggctgggattacacgtgcccaccaccacgcccagctattttttgtattttttgtagcgacggggtttcaccatattggtcaggctggtcttgaactcttgacctcaggtgatccacccacctcggcctcccaatgtgctgagattacaggcgtgagccactgcgccaggccacaaatgtcctttttgcagcatttgtgtgccataggtttcacatttctgtggtatttattattgattttgctgtttgaaatggcccccaagcatagcactgaagtgctatctggtgttcctaagaaaatacatgttttgggtccggcgcggtgaatagtgcctctgtcgacatgtgtgtatgtgcatctatgtgagtgcatgttttcatttattttgtgaatattctaggagtagaattgctgagatatatggtaattctgtgtttaactttttgacgaatcattaaacagtttttctcagcagctgaaccattttgcatttccaccagcaatgcatgagtgttccaatatctccacattcctgtcagcatttgttattttctgcatatttacttatttatttatttatgtaatttagagataggatctcaccctattgctctggctagaatgcagtggcatgatcatagctcactacaacctcaaactcctgggttcaatcctcccgactcagtttcccaagtagctagaaccacaggggtgtgccaccactcccagctaattttttaattttttggagagatggcagtcttgctatgtcgcccaggctggtctcaaactcccggacttaagtgatcctcctgccttggcatcccagagtgctggcatgagtcactgttcccagctgcaccccccaatacacacactttaaaaaaaaattgtagctgtcctagtgtgtgtgaattgagacctcactgtggtttttgtctgtgtttctctaaagactaatgatgttgaacatctttttatgtgcctgttggtgatttacgtatcttctaggaatgtctattcaagtcctttgttcatatttgtttcccttttttattgctgccgcacaaattaactttgttcatgttttaattacattaaaacatagacttttatcagatacatggtgtgcacatattttctcccattctgtacattgtctttttactttcttaataatatccttcaatgcacaaaagtttttaatttgatgaagtctaatttgtctatttttcttttttggcttgtacttttggtgtcatatctaagaattaattgccaagtccaagatcatgaaaattcatccttgtgttttcttctgagagttttatagttttagttcttatatttataataatttttaaggtaattgcaaggttagggtccaacttcatccttttgtacatgtttatccagtggtcctaggacaatttttttaaaaggctattctttctcccattgaattgtcttagcacacctgtcaaaaatcaattgaccataattgtataggtttatttgtggactctcaattctatttcattggtttatatgtctgttcttaagctaataccacactgttttgattactgtagctttgtagtaagctttaaaatcaagaaatatgagccctccaactttgttcttctttttttcaagaatgttgtggctgtttggagtcttttacaattccatgtgaatttgagaatcagcctttccacttctgcagaaaagaccaatgaaattgcattaaatctgttgattgctttgggtagtattgacatcttaacaatattgagtcttctaatccatgcacatgggatgtttttctatttgtttaggtcttccttaatgtctttcagcaatgtttcatggctttcagtgtacaaattttgaacatcttttgttaaatttattaccaagtatttttattgtttttggtgctattgcaagtggattgtcttaattttctttccttagtttaattttcaggttgttcgtttacaggttgttcacagaataattgttcaattattctctgaataattctaaccaggccaggcatgttggctcacgcctgtaatcccagcactttgggaggccaaggcaggtggataacctgaggtgaggagtccaagacaagcctggccaacatagtgaagccccatttctactaaaagtataaaaaattaactgggcatgatggtgcatgcctgtaatcccagctacttgggaggcatgagacagaagaatctcttgatccagagaggcagaggctgcagtgagccgagatcataacactgcactccagcctgggcaacagagtgagactctgtctcaaataataataataattctaaccaatgaagtatgattggcaaagacgtgtgtcattttcaatcatacctcattggttagaatttttttatttttattttattttctttttgagatggaatttcacttttgttgcccagtctggggtgcaatggcatgatctcagctccgggttcaagcgattctcctccctcagcctcccaagtagctgggattacaggcatgcactgccatgcccagctaatttttgtatttttagtagaaatggggtttcgccatgttggccaggctggtctcaaactcctgacttcaggtgatccacctgcctcagcatcccaaagtgctggggttacaggcataagctaccatgcccagccttggttagaattattcacagggtcaggtatgactaccacaaccttcaatgaggagattgcagaattcttctctgaaattcctggcttcaaacgatcctcctattggcttcccaaagtgctggtattacgggtgtaagccactgcacccgaccagtatatcttttaaaagaaacattcagggaacaaaaaggagctctcagaaattaagaaagcaagaagtaaaaaaagaaaagggaagaagaaagaaattgctgaaatcttgcagagatcagagaaaatggagaacattagaaggtcacacaaaaagatcccacatctaaataataagcatttcagaaaaataaaactgacaaaacacaggaaaaaaagctgtagatgaaataataagagaaaaaatttcggaacttacaggtgtgataattttgcactccagcctgggtgacagggtgagactctgtcaaaaaaacaaaacaaaacaaaacaattgaccatagatgtatgggttatttccagactctcgattctattccactaatctatatgcctatcttcctaccaataccaaacttttcgattattgttgctttgtagtaaattctgaagtcaccaagtgtgagtcttccaactctgctcatttttcaagattggctgttgggtgcgataccatgtgaattttaggtttgaattttccaggtctgcaaacaaggacattgggattttcatagagattacatcaagtctatagatcactttggagtagtatcgccatcttaacaatattgagtcttccaatacataaacgtgtatttttagagatatatggcatggcatttaaagtaatctatcatgatctgtgtaacttcctctaaagtatttcaacagaccacaataagatattactctaattgtgctagaatggctataatggaaaagtaaacaacagcgtcaaaaaggaatgtgggttctggtttgtcttcctctccctaacttgatgtctagcttttttttttctttgagatggagtctcgctctgttgccaggctggagtgcagtggcacaatctcgactcactgcaaccattgcctcctgggttcaagcgattctcttccctcagcctcccaagtagctgggactacaggcacccaccaccatgcccagctaatttttgtatttttattagagacggggtttcaccatgttggccaggctggtctcaaactcctgatctcagatgatccacctgcctcggcctcccaaagtgttgggattacaggcgtgagccactgcgcccagcccacagttcatttttggttttgttttttcctcccaagagtgtcttgggttgtttgactcccttttattcccctatcagttttggaatcagattgtcaagttctgcaaaaaaaaaaaaaaaaaaaaaaggctgagcttttcattgggattaaatttgatctatgaatcaatacaagagttggcgccttcaaatctaggctcttccaatcaatgaacatgtatatctctccatttatttaggtcttctttactgtctctcaacaaaattttttaatagtttttatagaggttctgtaagtcctgtatgagatgttatatcttaccaggtactccctgggtacaagagggagagttgcttttcacccttttgaactgtttgaagttttttctaaccacatgcatatatttttcaaaataaaaattattaagatttttggcccttctgtctggcggcagcaatcaggtaagccaagatgggtgcatacaagtacatccacgagctgtggaggaagaagcagtctgatgtcatgagctttcttctgagggtccgctgctggcagtaccgccagctctctgctctccacagggctccccgccccacccggcccgataaagtgcaccaactgggctacaagatcaagcaaggttatgttatctacgggattcgtattctccgtgatggccgaaaatgctcagttcctaagggtgcaacttacggcaagcctgtccatcatggtattaactgaagcctacagttgattgcagaggagtgagttggacgccactgtggggctctaagagtcctgaattcttactggatgggtgaagattccacacacaaattttttgaggttatcctcattgatccattccataaagctattggaagaaatcctgacacccagtggatcaccaaaccagtccacaagcacaaggagatgcgtgggctggcatgtgcaggccaaaagagccatggccttggaaagggccgtaagttccaccacactattggtggttcttgccgggcagcttggagaaggcgcaatactctcaatctccactgttaccactaatataagtaaagtttgtaaaactcatacctaataaacaatttaggacagtcaaaaaaattactaagatttttgagccaggtgcagtggctcaagcctgtaatcccagcactttgggaggccgaggctggcagatcaccggaggtcaggagttcgagaccagcctggccaacgtggcgaaaccctgtctctactaaaaatacaaaaattagctgggtgtggtggtgcacaagtgttattccagctactcaggaggtggaggcaggagaaccgcttgaacccgggaggcagatgttgaagtgagctgagattgcgccactgcactccagcatgggtgatagagtgagactccatcacaaaaaaaaaaaaaaaaaaaattattaacatttttgaatcagcactctattatcattgtttacacatcaaaactatcagtaggcatacagtggaaagtctctctcccactcctggacctattcacaatattcccaatccttccttctcaataggtaatggctataaattaatatcttctttatccttccagaattcttcacgcacatgtccttaaatgtatactttctctcgtctcaagataaatgccatagactgtgtgtctttttgcagaatctcttgcaagactctgtgaacacagtgagaaaacatggacccaggaactgttccttacattcagctgaagctgagtctgcaagtcccaatgcatgccaataaagaaagttctgcaggccaggtgtggtggcccatgcctgtaatcccaccattttgggaggtcaaggtgggcagatcaactgaggtcaggagttcaagagcagcctggccaatatggtgaaaccatgtctctactaaaaatacaaaaaattagccgggcatggtggcatgcacctgtaatccccgctactcaggagggtgaggcaggagaatcacttgaacccgggaggcagaggtttcagtgagtcgagattgtgctagcctaggcgacagagcgagactccgtctcaaaaaaaaaaaaaaaaaggaaagctctgcagagttctccagggttacactctgttctctgcactacacccccaactttttttttttttttttttgagacggagtttcactcttgttgcccaggctggaatgcaatggtgtgatctcgactcaccgcaacctccacctcccaggttcaagcaattctcctgcctcagccttccaagtagctgggattacaggtgtgtgccaccatgcctggttaattttgtgttttttagtacagacagggtttcaccatgttggccaggctggtctcaaacccctgacctcgtgatccgcacacctggcctcccaaagtgctgggattacaagcgtgagccactgcacccggcctgcattgcactttttaatttttgatcaccatttattaagttacaaagagccaggcccagtgctgcgctaagcactttacatatttggcatgttttttcttttttactccttccagcagccagggcctatgaacttacagaaggcatgatgcctaaggcccacaatacttttagggccccatgaaaatgttttacttcttttaaaatcagaagaaaaaataaacataaccctgcctttattacatatatatattatttttagtttttagtttttggtatttttgagcaggagctctggcgcccaggctggagtgcagtggcacaatcatggctcactgcagccttgaccccctgggctcaggcagtcttcccacctcagcctcccgaggagctgggaccacaggtacatgccaccacttccggctaatttttatattttttattttttgtagagaaagggtcttgccatgttgcccaggctgttcttgaactcttgggatgaagtaattctcccactttggcctcccaaagtgctgggatttcaggcatgagccactgcaccaggccttgttatattcatccttatactaacacagtcataaaatatgatttaaaacactttttttcttatggaggaaggaacccaccaaaaaaatccatgtgactgagtgtggtgccgggtgtctgtagtcctagctaccaggaggctgaggcaagagaatcacctgaacctgggaagcagaggttgcagtgagccgagatcatgccactgcacttcagcctgggtgacagagtaagactctgtctcaaaaaaaaaaaaaaaaaaaaaaaaaaaaaaggccagcagtggcgcacacttgtaatcccagcactttgggagaccaaggcgggtggaccacctgaggtcaggagttcgagaccagcctggccaacatggtgaaaccccgactctactaaaaatacaaaaaatttagctgggcatggtggcaggtgcctgtaatccagctactcgggaggctgaagcaggaaaaatcagttgaacccaggaggcggaggttgtagtgaaccaagactgtgccactgtactccagcctgggcaataagagcaaaactctgtctcaaaaagaaaaaaaatcataatgtggccaaaccagcaaccctatgacatgggtattattgctatgcagtttatccaagggaggaaactagtctgagaagtgatttagcccaggtcaggtggctggaaggggtgggaacatggccttgaacccaagcctagtgactctaaagctcttatgctgggccactcagctgaagagactccagtcagcactttcctatggaagggacgtgtttggtcacaactgggaagttgtaccccacaaaaagaaggctctggggaaatgtgatacagtcttcaaatattttaagggctgtcatgtggaaaaggattagctcttttgtgttacttcccagagctgagctaggataggtggggtgtgttgcaggaaaggtagggtgtgtgtgtctgtgtgcgcgcgcgcgtgtgcgtgtgcgtgtgcgtgtgtgtgtgtctcgctctgttacccagactggagtgcagtgcagtgatcgccactcactgcaacctccgcctcctgggttcaagtgattctcctgcctcagccttccgagtagctgggactacaggcatgcactaccacacccagctagtttttgtatttatagtagagatggggtttcgcaatgttggccaggctggtctctggctcctgaccttaggtgatccaccctactcagcctcccaaagtcctgggatcacaggcgtgagccaccgggccccaccaggaaagtagattttggcccagtgatataacaaacttactggatgtgataagcccactgtcagtggtggtttattcttaagatcaaagatgtggagtttgaccccagtcacagacaacagcgttgtaaacaaggctgtattgcaggggattgctgccttgggaggggagttggacaagaattcgatggatttttatgtccctttcaactctaagattctatgtttgcagggcccagcacggtggctcacgcctgtaatcccagcactttgggaagccaaggcgggcagatcacctgaggtcgggaattcgagaccatcctggccaacatggtgaaaccccgtctctactaaaaatacaaaattagctgggcatggtggcgtactcctgtaatcccagctagtcgggaagctgaggcaggaggatcacttaaagccgggaagcaagggttgcagtgagccttgatagcgccattgcactccagtctcggtgacaaagcgagactctgtctcagaagaaaaaaaaaaaaaagattctatggttgcaaatagcagcagctcagcagtgtagagttgaattccccaccaaaccaattttaccaattgttattgagactttttatgtaccattggtgggagtatgaatggatactcttttgaaagtgttatttggcagtatttattaaaatttagactatttgggccgggcgcagtggctcacgcctgtgatcccagtactttgggaggctgaggcgggcagatcgactaaggtcaggagttcgagaccagcctgaccaacatggtgaaactctgtctctactaaaaactacaaaaagtagacccaggcgtggtggctcacacctgtaattccagcactttgggaggctgaggcgggcagatcacctgaggtcggttgttcagcctgaccaacatggagaaaccccatctctactaaaaacacaaaattagctgggcgtggtggcgcatacctgtaatcccagctattcgggaggctgaggcaggaggattacctgaatctgggaagcggaggttgtggtgagcagagatggcgccattgcactacagcctgggaagcaagagcaaaactccgtctcaaaaagaaaaaaaaaaaaactacaaaatgtagccaggcatagtggtgggtgcctataatcccagctacttgggaggcttgaggcaggagaatggctacaacctgggaggcggaggttgtagtgggctgagaatgtgccattgcattccagcctgggcgacagagtgaaactgtttaaaaaaaaaaaaatttcgactcttcaggcagggcacggtggttcttgcctgtagtcccagcaatttgggaggccaaggcgggcggatcacgaggtcagaagttcgagaccagcctggccaatatggtgaaaccctatctatactaaaaatacaaaaagttagctgggcatggtggtatatgcctgtaatcccagctactcgggaggctgaggcaggagaatcgcttgaacccaggaggcagaggttgcaatgagccgaaaccgtgccattgcattctagcctgggcaacagagcgagactttgtctcaaaaaaaaaaaattagactgtttatactttttgacttagcaatacttttttttttttgaaacagagtcttgctctaccgcccaggctggagtacgatggtgcaatctcagctcactacaaccttccctcccaggttcaagcaaatcccctgcctcagcctcccgagtagctgggctacaggcacgcaccaccacacctggctaacttttttgtatttttgtaaagatggggtttcgccacgttggccaggctggtattgaactcctgacctcaggtaatccacctgcttcagcctcccaaagtgctgggattataggcatgagccactgcacacggcctaacaaacatacttaataagtaaatcatggagtgggtagcaggtgagaaaggctgtgacgagaacttgcgatgcggggtggaggtggtggagggttgcaattttaagcagagtggtcagggtaggcctcacagagaaggtgatatttgagcaaagcattaaagatcatgaataggacacctcccactcttgttctaaggtggaaattcaccaggagttactttttcctttttctttgttttagaggcagagttctcactatattgcccaggctggtcttgatctacctgagctcaagcgatccacccacctcagcctacccaaagtagctagggattacaggtgtgaatcactgcacccagcactgggagacacttgtgaggtgcctggcatccagcaggctctgaaggacggtcgctattattgttcattttagtcctgaaatgaacaggagctctcaaagcgcttacctaaggaagatgtctaagagcattgcagtttgcaaatgaagagtgggcagggtttgggttatggtaactgttttatctgcctccccagaaaggaaacaaagtatctggtcagcggggaaggtttccacctgtgcgctctgtttgccagcgagcctgcgggcccctgtggcaatccacccattgtgtttccatcagcgtaactgcatgcgggaggctcctctgcactctcagtccttgaaacatcccccacagggcctccccaattaggcaacgataaagccattggtgtggtcagatccctcctgggacaggatgttaaccctcagcagctcctgaaccatgggagctggtccctgtcaatgtcacggaaacagaacaagaggaggcttcaaagaaatcagttgcccgcactccctgattgcaaccaggccttatctagtgccttttaaaaatggccctgaccctttcttcttatttattaaattatttatttatttatttatttttgagacagggtcttgctctgcggcccaggctggagtgcagtgactcgatctctgctcattgcaacctccgcctcccagattcaagcgattctcctgcctcagcctcccagtagctgcaattacaggtgcctgccaccacacccggctaatttctgtatctttagtagagacagggttttcccatgttggccaggctggtctccaactctctggcctcaagtgatctggccgcctcagcctcccaaagtgctgggattacaggcctgagttcccgtgctcggtctcttattactttttaaaatgagacaaggccccactctggttttgccacgttgcacaggctggagtgcagtggtgcgatcacggctcactgcagcttcaacttcctgggctcagctgattctcccaactcagcctttcaagtagctggtactacaggcactcaccaccacgcctggctaatttttgtattttttgtagagtcggggggcggtgtcttgccatattgcccaagctgggctcgaactcctgggctcaagcgatccgcccacctcgacctccccaaatgctgggattacaggcatgagccaccgtgcctgggccctgacctcttcttcagggtaacagatatctgctaggatctgctgtggcttctacgttcccttaagcaaagagacgtgcttcttcaagggagaggagaaaaaatagatttcaacccaaagccagtataagcaccccaagagaggtcaataaaatctcaatttggaggtgaggaaagcctttattggcacccaggacattggtgttgggattaagaggacagactggtggggttttgacacacacaaacgaaggatggtgtcttaggcacatggcacagcaaagaaaaaggcttgcaggctgtaactatgggacatattcaagctgtcctaagcagttccttttgactgaagtatcatgataaagaaaataatacataatagtaataacaaacattctttatatgcttgaaaccacttttataaaaatcatagtaataagggtaatttaacataattgactgggcgcggtggctcacgcctgtaatctcaacactttgggaggctgaggcgggcagatcacttgaggtcaggggttcaagaccaacctggccaacatggtgaaaccctgtctctactaaaaatagaaaaataagccaagcatgttggtgcaagcctgtagtcccagctactccggaggctgaggcactagaattgcttgaaccaggggggcagaggctgcagtgagctgagatcaagccactgcactcaagcctgggcaacagagtgagactctgtctcaaaaatacaaatttaatattattgactctatcttgttttcactatgctaaattgtttttctttatttttgtatagaggccacagtactcttttttttagaaaatgaatttttttgttattgtttaataattaaaaccagccagatgtggtggcttaagcctgtaattccaacactttgggaggctgaggtatgaggatcacttgaggccaggagttcaagtcctgcctgggcaacaaagtgagacaccatctctataaaaaatttttaaaattatctgggcatggtggtgcatgcctgtagtcccagcaactcaggaggctgaagcgagaggatcagttaagcccaggaatttgaggctacagtgagctatgattataccattgcattccagtctgggtgacagagtgagaccttgtctctaataaattaattaattaataaaaattttaaaattgacagaaagtcttacaagtctataagatctacttctgtctgttatgtctatgtttatatgtgccatgaatatataatatttcactactgaaatatatttttaaaagctctaatcagttgacttaaccacttaaattgaatatttcatcaaaaaataaaaactttaagtatcttttagttcacatgactttaataatctttagtaaataaagacagtttttcaattattagtaaaataaaaacatcttcagaatgtgaacatttggtgtaaattagacaagtctggtattgtctttactaagacctttcaggtcctaaactacttttataaatttttttcttagactgggactcactctgttgcccaggctggagtacagtggcatgctcactgcagcctcaacctccctgggctcaggtgatccttccacctcagccttccaagtagttgggactataagcacgtaccaccatgtctagctcacttgtgtatttttagtggagatcgagttttaccatgttggccaggctggtctctaactcctaggttcaaggcgtccaccagcctctgctcccaaagtgctagaattataagcatgaggcaccatgcctggcccttctataatattttaaataattgttggacttgtctattttaaagcccttagattgtagataaggcctggggatgtgtagaattaaccatgtcccctgcctatcctaaaaagcatcatatattattgacatatattattactgtcctagactctgtacctggtacataattaaaattgcctacctccttagtttttcattaaaaataaaagtcagtaatggctggatgcagtggctcacgcctgtaatcccagcactttgggaggccaaggcggacagatcacctgatgtcagcagtttgagaccagcctggccaacatggcgaaaccctgtctctactaaaaatacagaaattagctgggcatgcatggtggtgcacacctgtagtctgaggtactcgggaggctgaggcaagagaattgcttgaaccccgagaggcggagactgcctaagagttaacattataatatatgtaattaaaactactaaaggaacaattttacatacaaaggtaaaatttagttttttaaacaaaattttcatgtaatattaaaaaacagtaaaaaaatgtttctttgcaggagggacagattcagttagcctcatactgtctttattgggtcttgtttaaaacactgagtctcacatctgttaaaaaataagtctttgcctcttgaaaatttttgagttatcggctgggcgcggtggctcacgcctgtaatcccaacactttgggaggccaaggcaggtgggtcccttgaggtcgggagttcgagaccaccctggccaacacagtgaaaccccatctctactaaaagtacaataatttgctgggcatggttgtgggcacctgtaattccagctactcaggaggctgaggcaggaggattgcttgaacccaggaggtggaggttgcagtgagctgagatcacgccactgtactccagactgagcgacagagagagaccctgtctcaaaaaaaaaaaaaaaaaaaaaaaaagttgaaatcatacaaagtacttttggccgggtgcggtggctcacacctgtaatcccagcactttgggaggccgaggcaggcggatcacctgaggtcaggagtttgagaccagcctggccaacatggtgaaaccgcatatctattaaaaatacaaaaagtagctgggtgtggtggcgggtgcctataatcccagctacttgggagactgaggcaggagaattgcttgaacccgggaggcggaggttgcagtgagctgagatcaggccattgcactccagcctgggcgacagagtgagaccctgccaaaaaaaaaaaaaaaaagtaatttcttcaaccacaacagaataaaactagaaatcaacaagagaaagaaaatttttagattcacaaatatacgattatgtagaaattaacataaacaatgagtaaaataagacatcataaaaaaatttttaaatattttgagatgaatgaaaaagcagtacaacttaccaaaacttatgagatgcagcaaagacaatgctcagagggaaatttatagctgtagtcacctacatcaaaaatgaaagagggtgggcgcagtggctcacgcctgtaatcccagcactttgggaggctgaggcgggtggatcacctgaggtcaggagttcaagaccagcctgaccaacatggagaaaccccatctccactaaaaagacaaaattagctgggcatggtggcacatgcctgtagtccttgctacctaggaggctgaggcaggtggatcactcgaacccatgaggcgaaggttgtggtgagctgagatcgtgccattgcactccagcctaggcaacaagagtgaaactccatctcaaaaaaaaaaaaaaaaaaatgaacacttgaggccaggagtttgagaccagcctcagtaatatagcgagaccctatctgtatgaaaaatacaaataaaaaatctagccaggcatcgtggcacatgcctgtgatctcagctacttgggaggctgaggcaggaggatcacttgagcccaggagtttgaggctgcagtgagccatgattgcaccactacactccagcttggacaacagagcaagaccttgtctcaagcaaaaaaagaaagacagatctcaaataaataatacattcttccaccttatgggattagaaaaagatcaaactatgccgaaagcaagcagcagcaaaaaaacaataaaaattacagtgaagataaataaaatatagtattctataaaagcaatagagtcaacaaaaccaaaaactggttctttaacaaatcagcaaaattgctaaacttttggaaatactgatgcccccagaagaagaatggagatggcccaaaccactaaaatcaggaaccaaagattactacaacccttacaaaaataaaagattataagagaatactataaacaatgacatgtcaattaattgaatacacctggaagaaatgtacaaatttctagaaacacacaaattaccaagactaacccaagaaaaactaggaagtcggaatagatctataacaaggaaagagatggaattggtaacaattttttaaagttccgtaaggaaaagctcaggacccgatggctccattggtgaattctaccaggtatttgaataattaaggccaattcttattaaaatcttcccaaaactagaagaggaggcaacatttctgacccactctatgaggccagcattaccctgataccaaagccacacaatgacattacaggaaaaggaaactatagaccaatgtcccttataaatatagatgcagaaatcctaaagaaaatactagcaaatcaaatccagcagcatagaaacatattatacatatgtgttaacagatgagacttatcccaagaatgtaagggtgattcattataagaaaatcagggcagggcgcagtggctcacaactgtagtcccagctacttggcatgctgaggtgagagaatcacttgagctggggaggttgaggctgcggtgaaccatgtttgtgccactgcaccccaccctgggtgacaaagtgagaccctgtctcaaaaaagaaaaaactcagccaggcacggtagtgcacgcctgtattcccagcacttttggcagaccgaggcaggtggaccatttgaggtaaagagttcaagatcagcctggccaacacggtgaaaccccgtctctactaaaaatacaaaaaataaaaataaattagctgggcgtggtgacacacgcctgtaatgccaggtgttagggaggctgaggtaggaaaattgcttgaacccaggagatggaggttgcagtgagccgagatcatgccactgcactccagcctgggagactgagtgagtctccatctcaaaataagtaaataaataaataaataaataaataaatgttattcacaacattaatagaattaagggataatatagaaagcaggtcctnnnnnnnnnnnnnnnnnnnnnnnnnnnnnnnnnnnnnnnnnnnnnnnnnnnnnnnnnnnnnnnnnnnnnnnnnnnnnnnnnnnnnnnnnnnnnnnnnnnnccagtctctataagggacatatcttgaattcatatgcacattcttttttttgagacagggtctcactctgtcgcccaagctggaatacggtggtgcaatcgtggctcaccgcagcctcaacctcccaggcccaggtgatcatcccacctctgcctcctgagtagctgtgaccatggccatgcaccatcataccaggctaatttttttttttttttaattttgtgtagagactgggtctcgctatgttgcccaggctggtttcaaactcctgggctcaagccattctccagccttggcctcccaaagtgctgggattataggcatgagtcaccacgcccagctcacatgaacattttaaactgcatcacacgattgctggagatctgatagtatcttgagaatggaccttgaaaaccaacaagcaggctacaccattgctgatagtcacccaggagaaaacacaatcacgatggacatattgcagcattaccctaacatggcttgtatataactcctggcagcaggtggattgcgtccatgccagggtttctcaactgcagtactactgacatttgggaccagaggatttttcattatggagcccatcctgtattgtaggatatttagcacaccccctggcctctacccactagactctaggcgtgcgctccctgccccatcgtgacagccaaaaatgtttccagacattgccaaatgtcccctggagacaaaatcatccagagttaagaaccactgataataggcgatttaaagaatatctttttttcttagtagtgctatatttactttaatagctattaaagtaagcacataaatataaccaacctgtgacttcaaagacattctaaagtgatatgaaacttccttttgcgataactttgttaaggcttaaaaagtgaattgattgaaagaaaaacattagctgagtgtgatggctcatgcctgtcatcccagcactttgggaggctgaggtgggcagacgacttgaactcacaagttcaagagcagcctgggcaacatggtgagaccccatctctacaaatataaaaattagccaggtatggtggtgcatgtggtagtcccagctactctggaggctaaggtgggaggatagcttcagcctaggaggtagaggttgcagcgagctgagattgtgccaccacactctagcctgggcaacagagccagccagaccttgcctcaaaaaaaaaaaaaaaaaaaaaaaaaagttaaaaaataagtacatgttggacaatattggctggcttactcaaaagtttctcccttgctgtttcctcctagagaagcataaaaccaaatgctcatttttcctgcctcccttgcagctagaggtggtcatgtaatccagtttcagccaaggagacatgaccagaagtctgcaatgtggacagaagagcctttgaagaaggcttggactttcctgaatagaaaggaacccatgaggctggtgcaatccctccctcttcctaccttgaacccagatatattgcctagggctgtagcagccatttaggggccttgaggaaaagacaagaaaacagcagagatgtcagtcctaacaaccctgcatcactaatccaatgccagcaactccaagaggtactggaattcctgacatgtaaaaaataaacaaatgaatacctttctgcttaggctgctgaagtagggctgtttcttgaagccagatgcaatcctaacagatacaaggtaagagatagatgtcaaaatcctgaagactagactcaaatgactgaggggcaaaacagctggggaaagggcaggctttgagtcaacctgctgggtttgaatactgtgtccactccttgctagtgacatgatcctgcgcatgtttaactgtgtcacagattccccatttaaaataaaaagtcattacagcaaccacccagcatgactgtgggcctgaaacaagttatgtgcagagagggctgggcataccacacaacacagagtgacctcaacgcatgttattttatttataaaatcaactcctggaggttccgtctctcagctttggagccccccaccctctgtctctgtacaggggaccttcttccttctcccttccttcttgcctattaaactctccactccttaaaaccactccacgtgtgtctgtgtcattttatctaaaccggcatgaggaccaagaaccctggtgttcccccactcatcggagccgtatcattttggtgtgttggccaggaaaggaaattatttcatcagactgaagcaatcaaactcaaaatggtgctgtaacctgaagcacacatggacacgccattcttccgaggacccttagatccaccccaggaggagccctagctgctgttccccattcaacgccccttttcaccaggaagtagccagaagaagtcgtcgcccaaaaccccctaacagcagttaatgtggcatctccacagggggtaatgcaggagttaagcaattattttaggcaaatagagaggaaaaggggtccttgggaaatgtttggtttttaaagcaactccggaaaagtttcttgtaaagccccggctcttagagccaggccagcaacctttgatatgcaaatgcaagccattagaaactgggtccacccaaacatggcgattcccacagccttcttgccctttccccacatgttcctagcaacatggccgccaccacacctccccaagtgtgcagatcatggtaccctgcatttgcatattaaaaggctaggtgggagggccagctttttcatgcgctacgtgaaagacatgcctagtcaaaccaatcccctgaggcctatgcaaatcagacactgcctcttccagcctctgtacatatacctagctgctatctgtggcagctggggttccctctctcagctttggagccctcctccgtctctatacaggggatcttattctcccttctttcttgccccttcttgcctattaaactctctgctcctttaaataaacaaacaaactcttaccaaagtcacacaagcaagatggggataaggcagactagaagtgattagtcattggttctttccaacacttgagaaggagttgtctttagggactgagttgaaggccaggtataatggctcacacctgtaatcccaacactttcggaggccgaggcaagaagatggcttgagctcaggggtttgaaaccaacctggacaacacagggagacctcatctgtacaaattaaaatatatatataattttaaagaaataattgtgttgtaaatatccctgtcttagagctaatgcctaagcaaggaggggggaaagaaagctgccaaggcttcccacaggatccaagtcctacaggcccaattctcagcctccttctggttctttttctcttccctactctttgactccagccacagtggccttcctcattaagccagtgcttctgcacatgccatttcccactgcccagaacattcttaccttctgcttttgcctatacagcagaaactgctagctgcgctccagtatcaactctccctcatccctgagtaacatcttcagctgggtacatcctgcttagaaaggaaactacatttcccagcctcctttgcagctagaggcaccacatgactaggtacaagccaatgggatgtgacgaggagagacgtaggcaacctccaggttgtgcccttactctgctttcctactggctgccatgtggacatggagatgcatcatcttgatccatgcagatgaggacagcagagcaacaagatgggaggggcctgggaccctgattattttggggacagagctgccacaccagctgggatttttacatgagagagaaatgagcttgtatcttaacccactatatttggggtctttgacacacatagccaaacctgtatcatcaaacgggttccccacttaaggagtctccttttttctctccaaccagatgaaaccccgctattgcactcaccgggcaccacgcagctccccttcatagcacttcctgatgattattcatttatttggccatttccccaacaagactggggctcaaggaaggcagggaaccatgctctgtataccgctcgattcccagcatggagcccaggtaagggctatggaggaccctcagagactgtcacctgaatgggaccagtcaggccatgggacccattcatgggcactgaccctcggagattctacctcctgcaaagagctcctgagagggtctaagatacccactcacccaagtcttgcctcgaatttccccaggacctacctgtacacagaggtttaaaaaaaaaaaagactatgggctgggagcagtggctcaagcctgtaatctcagcactttgggaggcagaggcagggggatcacctgaggtcaggagtttgagaccagcctggccaacatggcaaaacccgtctctactaaaaatacaaaaagtagccgggcgtggtggcacatgcctgtaatcccagctactcggggggctgaggcaggagaatcactcgaaccctggcaaaggaggttgcagtgagccgagatcacgctactgcactccagtctgggcaacaagacagaaactctcttaaaaagaaaaaaaaaaaaaaaaaagactgaccagctgcctaaagaggaaacaattatcagcaattactcagatccatgttacatttcatctgcaattaaatatcaattaacaaaaatgcatcataatcaagatgcaccagcccacgcaaacaaaaaaataaagactatatgttttgttttgtttttctgagacagagtcttgctctgttgcccaggctggagtgcagtgccatcatcttggctctctacaacctcctcctcccaggttcaagtgatccttatgcctcccccttcccagtagctgggattataggcaagcgccaccacagttaatttttgtatttttagtagagatggagtttcaccatgttggacagcctggccttgaactactgacctcaagtgatctgcccacctcggcctctcaacgtactgagattacaggtgtgagccaccacacctggctgactgttttcaatacaaaaaaaaaaaagaaaaaatattagctgggcatggtggtgggcacctgtggtcccagctactccagaggctaaggtgggaggattgcttgagcctgagaggtcatggctgcagtgggccatgatcgtgcccctgcactccaccctgagcaacagaggagatcctttctcaaaatacacatatatatgtttttgtagaatcccgttcttgttcttaaaaaataccatgtatttatggctgggcacggtggcttagacctgtaatcccagcactttgggaggctgcggcaggtggatcacttgaggtcatgagtttgagaccagcctggccaaaatggtaaaaccccatctctactaaaaatacaaaaattagctagacatagtggtgcatgcctgcagtcctagctactcggcaggtgaaggctgcagtgagcagagatcacgccacctgcactccagcctgggtaatagagcaagactctgtctcaaaaaaaaaaattactatatctttaggatctgtggagaagagaggctgaaaattaaaaacatcaacctgccaataagattgtctctagaagaggctggccatggtggctcgccgccggtaatcccaggactttgggaggccgaggtaggcggatcacctgaggtcaggaattcgagaccagcctggctaacacagcaaaccctgtctctactaaaaatacaaaaattagccgggcatggtggtgcatggtacacacctataaccccagctactcgggaggctgaggccaggagaatcacttgaacttgggaggtggaggttgccgtgagccgagatcactgtactccagactgggcaatggagcaagactccgtctcaaaaaaataataaaagaaaattatctctagaagggattttcatgtttcactcatttctgcactgttttcattctatactgtaccccttataacatcagacaagacaaagagtaggagaaaagacgtccctttaagtaattcaatctctaccatgtttatagtaacagaaaacctggaacttccaaaatatgtatatgtcagcagttctcagagttgtgatagtctggcttcacacaaatgctatgatttaggtagttaaacaagttttttttttgttgtttttttttttttggagacagtgccatgctgttgtccaggctggagtgcagtggtgcaatcatagctcactgcagctcaacctcccaggaccaagcaatcctcccgcctcagcctcctgagtagctgggactacaggcatgtgccatcatgcccagctaataataataataattattattattattattattttgtagagatggggtctttctgttgcccaggctggtctcaaactcctgggctcaagtgatcctcccacttcagcatcacaaagtgctgggatcagacgacagcaacagtgcccagtccaagttttcttaaacctaaactacaaataaaactgcagaatgaatctccccacatatcagtccaatttcagagctgaaacctgatacccatcttgtccaagagactcacccagacctggccaccctacagacagatgctctataacaacagggtgaattaacctgaatcgtctatactgattttcaaacctaggctcctgaacttggcctcttcacccagcatacacctccctggctttctctggagctacaacatctcttcaccccagcctcctccaccccatccccatggccctttggagaatatagagggtgtgactcagaggtgagccttttctccaaacactcccctaccaagtatgcagagaactggacataggccagctttgtcccaagtaccaagcatcaaacggctcactccacggatctcagggggcaagggaccaaagttaaagatgaaagagccctattaaaccactgcaggccaggcacagtggtgcccacctgtaatcccagcactttggaaggctgaggcaggagaactgcttgaggccagaagtttaaggctgcagtgagctatgttcatgccactgcactccagcctgggtgacagggcaagacctcatctctaaaaaaaattaaaaattagctgggcatgttgacaagcatctataatccaagacactcgggagggtaaggcaggaagatcgcttgaggccaggagttcaaggctgcagtgagccatgatcataccactgcactccagcctgggcaacagagtgagtctctgtctctaaaaaaaaaaaaaaaaagagagagagaaaagcaaactacaattgcagcactcagagagatcctgatctaacatgcgatcctgggttagtaaattagtgaagccttatcaaagggctcgcagataagccaacttaattataactactgggttacccttcccagtgccagacagctccaattttcttcctggccacgggtctccagccttacaaggctgatggaggaaccctagaaaagcctgactttttttttttttttttaagataaagtctctctgtcacccaggctggagtgcagtggcacaatctcagttcactgcaacctccgcctcctgggttcaagcaattctcccgcctcagcctcccgagtaactgagattacaggtgcctgccaccacgccagctaatttttgtatttttagtagagatggggtttcaccatgttggtcatgctggtctccaactcctgacctcgtgatccgcccacctcggcctcccaaagtgctaggattacagtcgtgagccaccgcgccctgctgtgcctgacattaacatgcaccatcgtccactctgaataataaccacagcagtaagtaaccttagaccctgctagaacggtgagctgggccagctcacttttagaaaataagacaatggctagagtgaagccttttcagatgttattcattccactcctgagaacatcatctaaggaaataagccaatacgcactctacccatgtggtattcaggacagtgttttctttaaaagaaaaataaaaatgactgggtatggtggctctcgcctgtaatcccagcacgttgggaggcagatcacctgaggtcaggagttcgagaccagcctggccaacatggtgaaaccccatctctactgaaaatacaaaaattaatcaggcatcatggtacacatgtgtaatcccagctactccagcggctgaggcaggagaatcacctgaacccaggaggcagaggtcacagggagccaagattgcgcaatgcactccagcctgggtgatggtataagatgctgtctcaaaaaagttaaaaagggagaaaggggctgggcacagtggctcatgcctgtaatcccagcactttgggaggccgaagtgggcagatcacaaggtcaggagatcaagaccatcctggctaacacggtgaaactccgtctctactaaaaacacaaaaaaattagccaggcgtggtggcaggtgcctgtagtcccagctacttgggaggctgaggcaggagaatggcgtgaacctgggaggcggagcttgcagtgagccaaggtcgcaccactgcacttcagcctgggcgacagaacaagactccgtctcaaaaataataataaaaaaaaaaaaggagaaagaaaacacagcaacccaaatgtcaaaccacagataataattatgtgattatagcccaccaacacagggaactatcgattggacatttataggtttaattaaaaaggttacgtgggtacatgggaaaatacttattacagtaaataaaaacataggagacagtatgcaagctacaaatgcaaccttgcaaaactacatactagtaagaacaagactcaaatgttaatatgccaataggaaaacaatagcctgtaacaaaatatttatacaatacaggtgatggacaaagaggaaaggtcccacaataacaagagcccttacaaactaacaggaaaaagacaaactagtccaggcatacccaaaaaggactcagaaagacacactgaaaatacacaaattgctggaaaatatgttgcaggatacatagcttctaattgtaattgaaatgcagatgaaaatatattttagctatcaaattaacaaactttgatcccagcactttgggaggccaaagccggaggatcgattcagtccaggggttcaaaaccagcctgggtaacatagggagatcctgtctctacaaaaaataaatttaaaaattaaaaaaaaaaaactggcagagtaatgattacaacataatccattttgatttaaatgttatttaaatttataaatatttataaaatttcaaagaaaaaatacaagaatacattggttattggttagcccaagagattactgatatggtctggctctgtgtccccacctaaatcccatcttgaattgtaatctgaattggaatccccacatattagggaagggacatcatgggaggtgattagatcatggggacggttcccccatgctgttctcctgatccttgctatgctttagcaaagagactggcagcattttgaccctgccctagagatctgtggaactttgaacttgagagagaagatttagggcatctaggggaagaaattactaagcagcaaagcattcaagaggaagcagagcataaaagggtggaaattggccgggcgcagtggctcacgcctgtaatcccagcactttgggaggccaaggtgggcagatcacttgaggtcaggaattcgagaccagtctagccagcatggtgaaatcctgtctctacaaaaatacaaacattagccaggcatgatggcgggtgcctgtaatcccagctactcgggatgctgaggcaggagaattgcttgaacccaggaggcagaggttgcaatgagccgagatcatgccattgcactctagcctgggcaacagagagagactccatctcaaaaaaaaaaaaagtgtggaaatttgcagtctgacaatgtaaaaagaaaaacccattttctgaagagaaattcaagccggctgcagaaacttgcaaaagtaacaaggagcccaattccaagacaatggggaaaatgtctccagggcatatcacaaaccttcacagcagcccctcccatcacaggcctaggagggaaaaacggtttcctgggctgggtccagggcccccctgatgtgtgcagccttaggacttggtgcccagccactccagtcatggctaagaggagccaaggtacacagctcaggctgtgccttcagagggtgcaagccccaagcctcggcagcttccatgtggtattgagcctgtgggtacatagaactaaagaactgaggtttggaaacctccacctagatttcagaggatgtatgcaaatgcctggatgtccagccagaagtttgctgcaggggtggagcctttatggagaacctctaccaatgcagtaaagaagggaaatatggggtcagagcccccacacagagtccccactggggtactgcctaatggagctgtgagaaaagggccaccatccagaacccagaatggtagatccacctgcagctacatcgtgtgcctggaaaagacggagacactcaacgccaacctgtgaaagcagccaggagcggggctataccctgcaaagccacaggggcagagctgcccaaggccgtggaagcccacctcttgcaacagtgtgacctggatgtgagacacggagtcaaaggagataactatggaacttgaaagttttatgactggcctattggatttcagacttgcatggggcctgcagcccctttgttttggccaatttctcccatttcaaacgggtgtatttatccaatgcctgtacccccattgtatctaggaactaactaacttcttttgattttacaggctgataggtgaaagagactagattttgtctcagatgagattttggacatagacttttgagttaatgctgaaatgagttaagactttggggaactgttgggaaggcataattgtgttttgaaatatgagaaagatgagatttgggaggggccaggggcagaatgatatggcacggctctgtgtccccgcacaaatctcatcttgaattgtaatcttaattgtaatccccacgtgttggtggagggacctcactggaggtgattagatcatgggagcggttcccccatgctgttctcctgatagtgagtcctcagaagatctgatggttttataccggcttttctcctctttactctgcacttctgtctcctgccaccatgtgaagaaggacatgtttgctttcctttccaccatcattttaagtttcctgaggcctccccagccatgcagaactgtgagtcaattaaacctctttcctttataaactacgcagtctcaggtattttttcatagcagcatgaacaaactaatatcagtaccatgttcaggctttatttaaatatctttgtattgtttgttctgtcatatggaacacatgtcacttgtgatcagaaaactctgcaattaaattagtttaggtgtaaaaatcagagtgacattagcatggtgagactatcagtaatgtttttacacattgttaaattattgatttaaaagcaatttttaaaataagtccaaagatgtttaaaatttaaacacatcttttaaaaaactgaacaaaaccaaagcacacttctgctttgatctcctgacctctggaaagtaaggtttaacttaactgggcaaagccctctcacacacagccaagcaacatgggcctgatcacttcccagcttgctcaatttttctgatatggcaggaaaacaacaggtgcttaataagtgctggtgggcccattagtgggagtataaactgctgcagtaacctgacaattaactatcaaatttcaaaatgcacatactgtcaacctagcaatttcctgtgggaaaatttattctgctgaatcatttacatatatttgcatacatgtgccttcagtgcagcactgcttatcacagcaagaaaccaggaactgggaatgaccttgatagacaccaagaggggaatgggtgaatacatggctcagccatttaacaggcaaatgcgtggcttgtttaaaaaaaaaaaaaaaaaaaagttgatttgattggcttttactttcaatttgcatgggcttaaaatggcaagaaaatcaacactggttaagtgaagagaacaagagacaaaacagtatttaaaatacccaactagggagggaaaaaatgaatatgtaaacatatacacacaaacgaacacgttcttgcacatacatttgcatacacttgaaacttttctcgaaaaacacccaagaaactatcatcaacaaccatcatcaataacggctacttctgggaacaaagggcagggtgggaacatactaaaacttttatttttccctttatattcttctagaatattcaccttaaagtattagcatcatcaacaaagttgcagtacaagatcttcctcctgcaatcagccagatcaattcaacaacatcttgttttaaaacaagagttttctagcaacctatagaaagtcctcttaaccacaggaaaaaagtacctcatcatcttacgaacaagcctttggcggagaatcaaaggcaactggggagtggggaaacccaagttggtcttgatcacaaacgtttcagttaaggttctgagaaagagaagagactcataaaacaaaataaactgaatttttaagacctgagattcagcagggcgtagtgcctcatgcctgtaatcccagcacatggaaggaccaaggtgggtggattgcttgagcccaggagttcgagaccagcctgagcagcatagcaagacccccatctatttaaaaaaaaaaaaaaaaaaaaacctgcgtttcattaaaacataaacagatcagaaggttcttgcttctgccagggaccatgcattgttctacttccttgctgagctggtaagcgccttccctggaaattccaggaccacaagccattgtgttagtgctttatgcattttgccgaatgctccaggcgagatttttatgagatgggctctgcagttcctttgagttaaacttctcaatactttaaccacaccatgatcttcctcaaggcctatgcacattctcttcccactctgggactcccttcccccacatccttgcatggccagctttgccactgagctctggggtcaaacctcaccgcctccgaaaggccttctgtggacatccctccgtagtagtttgcacctcacccagtttttcccggttcaagtctttgcagcacttgccagcatctgaaatcatttccgtcaccctcagtgtaaaccccatgagaacatgggcctggtctgtcctgttcactgttgtatcctcagtgcctagagcagcagcagcacatagtagctgctcaattaataatgactgaataaatgaatgaatgaaaagcagtgtgggaagaacaatacaatgaacccaggggtatcaaagaccacacgaggctgggcgtggtggctcacacctgtaatcccagcactctgggagactgcttgagctcaagagttcaagaccaaactgggcaacatagtgaaaccccatctctacaaaaaaaaatacaaaaattagccgggtgtgctggtgcatgcctgtagtcccagctacttgggagggtgagttgggagggtcacttggcctgggaggtcgagactgcagtgcagtggtacaatcagctagggcgacagaacaagactccatccatcaatcagtcaaacaccacacaaatttcttgtactgggaagacttagacatcacacatattctccaaacaagtattacctaggaggccagtaaaaggtacactgaggttcctcagagagaaaactcacagagaggaagataaaagctccataaaaatctcaattactacttgagggttacaggatgctagcctagagcctccctccctagacaggtttctcagagagaaaactcacagagaggaagagaaaacctccataaaaatctcaattcctgagggttacaggatgctagcctaggggcaccctccctggtcattaacacccactttccagaacctggcaacctccccaggagatgaatcccacagttaaactaaggggacacttaagtggaatctcaactttgtaatcgtccacttctcctggggcactttaaaatgaaggagtagagcttcaaagctgatctctcaagaaagccattttcggctgggcatggtggctcacgcctgtaatcccagcactttgggaggccgaggcaggaggatcgcttgagcccaggagtttgagacaagcctgggcaacatggtgagaccctgactctacaaaaaatacaaaaattagccgggtatggtggtgtgcacctctggtcccagctacctgggaggctaaggtgggaagatagcttcagcccaggaggtcgaggctgcagtgagctatgattgtgccactgcactccagcctgggtgacagagggagaccctgtctcaaaagaaaaaagaaagaaaaagaaaaagaaagccatttttgttttcccaggggagaatgaactgtcacaactccaactgggaaaatggaaaaaggtaaaaagacacagccctcagtaaaaaagaaactgccgcaagtttcttctctagctaattggagtttaacctccttaacgtctcattaagcttctccaaggcaaccccagtaagccaattacactagaatttccacagcccacaacctcctagggaaatgcaggatgaggaggaaggtcttgctccatgtttctcccccatattcctccacaccagtggctgtgtgatttcacaccccagggaacatatggaaacatctagaggcattttcggttgtcacaacaagaggaggtgctaccagcatctactagggggtagaggccaggtttggggctaagactacgctgcacagaacagcaaccaggccacaaagaatgatgtggcctacatgtcaacggggccgacactgagcaactgtgctccatgtccccacccgcaaaatacagcttcctcaaaggccccgttcaaccattcagcctctaagaggtaagtgcaggtccccagcaccactccacccacagggatgctgccctatcccagttttcttgctaagcggggggaagcttgcctcaggatgtctggccattaattaattttggcaaaatgtttgggcaagttttcacgagctagagttgtactgaccacactaagagctgatcatcaaagctaggccttacttcgccatgaaaatctgaagccaacataccaatcagatgctaacttcaaggttggcctgcaaagcaggagatgccaactcagataccaacaggtgccaaagtgggttccatccatgcaagaagcagaccaggtgtgaggaagcacaattttaaaaaggcaacaggccaggcacggtggctcatgcctgtaatcccagcactttgggaggctgaggaactcaagtgatccacttgagttcaggaattcaagaccagcctggccaatatggagaaaccccatctctactaaaaatacaaaaataagccgagtgtggtggtgcgggcctgtaatcccagctactcgggaagctgaggcagcagaatcactggaacccgggaggcagaggttgcagtgagccgagattccactactgcactccagcctgggtgacagagcgagacttcgtctcaaaaaaataatataaaataaaacaaaggcaacaaacatttggccttaaaattaaagcaacaacagggaggggtggggactgcggcaaactggagcaactcagaaacggacagcctcagcggaccgctaccatgtataaatgtgggcctggggctagcagaacttctgatttttcaagggaagccagaaatccagatgtttctgtgaaatctgccaatgaataaacattgtagggcgggccacagtggctcatgcctgtaatcccagcactttaggaggccgaggcgggcggatcacgaggtcaagagatcgaggccatgctggccaacatactggaaaccccgtttctatcaaaaacacaaaaattagctggatgtggtggcgtgcccctgtagtcccagctactggggaggctgaggcagaattgcttgaacccaggaggcagaggttgcagtgagccaagatcgtgccactgcactccagcctggcaacagagcaagactccgtctcaaataaataaataaataaaattggaaatcacagtcattcctataattaaaatcaagccaaaccagcacagtggtgagctatatctaacccctagcttggaactcatacctcaaacactcaaattctaatgttgattgagcccccactgtgtgtgagacactgagtcctgggaaaagaggggtggacaaaaccctgttctgacctttccaagatgaaatagaagctgttctgccaagcacggtggctcacacctataatcccagcactttgggaggccaaggcaggcagatcgcctgagttcaggagttcaccaccaacctgagcaacatggcaaaaccctatctctacaaaaaaaaaaaaaaaaaaaattagctgggcatggtggtgtgtgcctgtagtcccagctacctggggagctgaagtgggagaattgcttgagctcaggaggttgaggctgcagtgagctgaggtcgcgccactgcactccagcctgggtgacagagcaagaccctgtctcaaaaaaataaaataaaaaaacaagccatctgatgagaaagctggaggactcagtttatctgagtgttcattccagacagttaagtgattatttcatccttaaaatccttacaaagaagtttcgacaccgcccaaaagccactgtaatacttcatgtcattcatttattcaacaaacagctgacccttgaacaacacacatttaaactgcatgggtccacttatactcagattatgcttctgcctctgccatccctgagatagcaagaccaacccctccccttcctcctcctccttagcctcctcaacgtgaagacaatgaagatgaagacctttatgatgatccacttccacttaataaatagtaaaaatctctcttatgaattaatcttaacattttcttttctctaccttgcttcactgtaaaaatacagtatataatatatatacaaggtatgagttaggccaagtgcagtggctcacgcctataatcccagcactttaggaggccgaggcaggtgaatagcttgaggccaggagtttgagaccagcctcggcaacacagcaagctccccatctctatcaaaaaacaaccaacaacaacagaattagtgttatcaactgcttatgttctcggtaaggcttccagtcaacagtaagctgttagtagttaaacttttagggagttgaaagttagacctgaattttctttcctttattgtgtttttttttttttagacagagtcttactctgtcacccaagctggagtgcaatggcgcgatctcggctcactgcagtgtccgcctaccaggttcaagcaatgctcatgcctcagcttctcaagtagctgggattacaggcacccgccaccacacccagctaatttttgtagagacagggttttaccatgttggccaggctggtctcaaactcctgacctcaagtgatctgcctgccttggcctcccaaagtgctgagattacaggcatgagccaccacacctggctaatttttgtagagatgggctttcaccatgttggccagactagtctggaactcctgacctcaggtaatccacctgcctcggcctcccaaagtgctgagattacaggtgtaagccaccgcgctgcatcctaaattttcaactacatggggcatcagcactcctaacccctgaattgttccaaggtcaactgttatttactaagccccaggcacagttctaggtgctgggattacagccgtaaacaaacacaggccaaaatccctgcccctatggagccgatcttttggtaggagtttacagagtaggcacaatacttaagcaaaatattacgtgtattagaaggcagtaagtgctactgggggtgtagatgggggacagagatttgctagtggagggaaagaacgggatgcctgaggtgacacctgaacaaagtttgaaggtgagggacatagtaggtaggagaaacagcaagtgcaaaggccctgaggcagggacaggcctggccacaagtgtggctggaggagagtgagacagaaagcagccagagaagaggtcagggaggccaaggggacagatgctgcccagccttcgaggccactgtaagccctttggcttgtaccctcaaggaactactgcagggttttagtagaagagggacagctgggccaagactagactgtaggggtcaagggcagagtaggcacagcagcgaacaggtggctgttttctttttttttgagacggagtctcactgtcacccaggctggagcgcagtggcgaactctcggctcactgcaacctccaaccccactgggctcaagcgattctcctgcctcagcctcccaagtagctgggattacagacgcccaccaccaggctcggctaatttttgtatttttagttgagacaggttttcaccattctgcccagactggtctcaaactcctggcctcaaatgatccgtctgccttggcctcccgaagtgccaggattacaggcatgagccacggcgcctggactgaggtgactgttcaaatccagaaactggccaacgatgactcgagccagagtggaagtcggggaagccatgaaaagcagcccgtttgaggcaacgggcaacacgatttgctgacagatgtgataggaatgggaggagaaaaagagaagtcaaagctggagactgacatgggaagaggaagctcacgttctttaggaacatggtcagtgggagacacccacatagagagatcagttcctaaaagttgtgtccacaaacagaaaaggttttcttcccccccatctaccaccaggtcccaaaggcgaggcaccccctccaggctatcacaaatggaacttgtcctcagagaaagagaacacgacccttcaggagagtcttggccaaagggaccggctgcagctgccttctgcagggcccctgtggctgcagtggctccatttggccaaggaaccctgaatccgctcctgattggcctgaatcacgaacccatttggaccaggaacccctgagtccactcctgcccaggcctctcccgggtcaccctcatctcctcccaaagccattcaccttgccaccttgcaccctgtcatgtcaccatcctggacctcagtgtccacatccacgaaatggggtgggtggagaggagggccccccaagatctgacatccctttccactctaacactccataaggaagggagagaggaagggtctggaaggaggggcagccaaaaagggggaaaacaggctgagcgcggtggctcacgcttgcaatccccaacactttgggaggctgaggcaggttgaccacttgaggtcaggagttcaagaccagcctggccaacatgatgaaaccccgtctctatgggggttttgtaaagttttgtaaaaatacaaaacttagccaggcatggtggctgtgcgcctgtaatcccagctactcgggagcctgaggcaggggaatcatgtgaacgcagcaggcagaggttgtagtgaaccgagatcacaccactgcaccctagcctgggcgacacagcaagacaccatctcaaaaaaaaaaaaaaaaaagggtggggaggggaaaacagaggaagtaggagaaggctaagggatggatttgaaaaccaaagccacacttggaggaggggaaaaattggctcgtcgtacactgctgttgagccaaggggaagaattaaaccagggatcagactgactccaaggcccagacctagccccaagaggaattcctaatagcttctaagatattcttccttggcggctaagtcagatattcagggggttactgagttggtggatgccacagagcatctcagaggtgcacatcaaccctgggaccagctcactccatcgacggtgacacacacctgcggcttccttctggtcttctccagtggcagttggtgcaacagcaaaaattaactggagaattccaggtggcaacgaccactgatctttactgagcgctgtgtgccaagcagcaacattttaagtccttgctaaggattaactcacttattcctcaagtcaccgctattcactaggtactacgttatcccacatagggaaactgaggcacggagagatgacgtaacctgcctcagcagcagaggcgaatttgctctgagccaccacactatactgcttaataccaagttgtttcctctgcttttccataatttccaatttttctacacagggcctgaagcacaattttttttttcttttgagacagtctctctgtcgcccaggttggagtgcagtgatgtgatctcagctcactgcaacctcttcccaggttcaagcaattctcctgcctcagcctcccaagtagctggaattacaggcgtgaatcaccaggcccagctaatttttgtatttttagtagggatggggttttgccatgttggtcaggctggtcttgaacccctgacctcaggtgatccacctgccttggcctcccaaagtgctgggattacaggcatgatctactacacccggccctcttttttttgagacagggtctcagtctgtggcccagactggagtgcagtgaccgtgatctcagctcattgcaacctccacccccacagccttcaagtgattctagtgcctcagcctccctagtagccgggaccacaggtgccacaccaccatgccaggctttttttttttttttggtattattagtagagacgggggtcaatccatgttgcctaggctggtctcgaactcctgacctcaagcaatccgcctgcctcagcctcccaaagtgctgggattacaggcgtgagccactgcacccggcctgctttttttttttttttttttttttttaatgaactcacaaaaagtcccaggcccatttttccaaccatcatgccaatatcaaccacaaagcagcgcctcctaccagtcccacccccatgagaaaagaaagccaagggctgctgtgacctgtcctcaggccctattttccgttttgatagcaaagttctccttttctcttcccagagcatctgtctgagtaaaggtcaacagaacacttatcatgggccatttccatcttctgggttttctggacatttcctgcggctcagaggcagacagtagcccagaaacaaagctctgacagagtcacccgaggcccactaaccttgacttctaagcacatgaccttggtcacaacaggagccaggcacgggtgcctcactgccttttcacagcccaatcccatctccaccagctgaagaaaaggggaatccaaaggaagaacaaggagcttaaaacacacaacttcatctttggaaaaaataatatttaatactaaccattgtttatctccgtgcagggcacaagctgagccacttacaagattaactcattgacccttcgcaacaacccaagaaggctgccacatttttggctcctgtccaattttagagatgaggaaagtgaggcacacagagggaaagtggcttgctcaaggtcacacagttatctgactgcctgggaggccagtcgctcctggcctcggacacgctaccttgaaaaacacaaaaacagccgggcacagaggcccatgcctgtaatctcaacacttttggaggccaaggcaggaggatcgcttgagcccaggagtaggagaccagcctgggcaatatagtgcgaatctgtctctataaaaaatacaaaaattagctgggcgtggtggcacacgcctatagtcccaggtacttgggaggctgagttaggaggaccacttgagccggggaggcagagattgcagtaagctgagatcgtgccactgcactccagcctgggtgacagagcaagactctgtctcaaaaaagaaaaagaaaaaaaaaagaaaagaaaaaagcaacaactacctactttctagctttcagttaattatatttcaattttcccactcaggccccagttgcctcctctcaaattctggttccaaggcacctccaacaagtcttggaatccagacagcagaaatacgcaaggtcaaacacggggatggggtacctaccagaggcagagatcagctacaattacccccaagcaaaacccaaccacctggcaatttctgtggcagaaagtccttaacgaaggaaaaaataaaaagaaaaaagaaaataaaaattttaaaaaatattacaactggacttcgtgaatgagtttcttaagataaacaaagcgcaccccaaacatactcattagccatcaactaccaattgccatcaataaaatacgtcctgatacaaaacctcatggatgttcaccctgttttgccccctcctcaattcagaagaaaataaacaagagaatattctggaattcacagcaacacaaacccagatcaccatgtgaatctttgcaaaaaataatcttgctgttactacacctggcaacaaggaagccacaggttttcccctgctaaagaaagtccatctgcaaagaggctccaatcacccccagaccctcaaggcaaagtctgtgttctatttccacccctggggttactctccaaccccactggcttaaaatgggagatatatcaaagtgtggtaggttattaaacacaatgataccctactaaaaaaaacaaacaaacaaaaccaaaccctccaatggggccctggaggatgacttttcaacactccaaatgcaaccctcgaggaaaggccggcaaaacaggacaagaaagtatttttggaagctgatcaccagctcctaagaaccaaggctgtttctcctgattcctaaacaaaagaggagagagaaacagtcgtgtccagatttgcctactgcgttcaccaacaatcaagacagcacgagacagaagtgcctgccttcctggaacaaagaggcaaatcgcattacggagaagctgaagcccaaaagactggggcttaaaccacagcaagtggactccagacacccagtcaggctccgcaggccacgttacagaagaaaacttgccggggttaaatctaaggggcatccccagagaggagctccacgtgttgcagggaagggagggcaggaccacagctaccagggtcctgggcgtcctcagctgcaccccaagtctgccccgagccgagggtcaggtagggcacatcaagggtggacatctcccttcttccctggttcccccaaacttcccccgcagtatctaagtagaaagaacaaaaaaaacaaagctaggtaaccacagaagagtaatgtggcttgtacgacaactttggggagacaatgaaagtccctttctacaatctaagcccctccccagctcaccccgttggtcacggagtatttttcgtgaaaaggggggaccctaaccacaaaaaagatgggaaaacagaagcagagagacacccctcttcccgccccccatctctagcgtccccttccctggaaggttgtttttacagacgggaaccccaaaacaggaaggcctcctcacggcggctctgacccgacccgaccctccaaaaccccagggctgggcacgcggccccccacgctctgctccgcaggaactgagtcacccaagtttccccactgccttgcacccccgaaaggggctgggccgcgggcgacgtgagggtcccgggcccccgaggccggcagcagagcggggagcggggtgccccgggcggctgcgggcccggtgctttccctccccgccggcctccctccgtcccgccggcctcacgcggcccccggcacgtacccagagcgggtcggagccatcggcgctgcagaagccccggagcgccatgccggtggcgcgggcggcggcgggcaccgggcggcgggtgatcgggcccggttgctggcgcgggcggcggcgggcaccgggcggcagggtgatcgggcccggctgctggagctagcgcatgacgaagaagagaagaaaaggaggaaacagaagaacaaggagcacgaaaccaaagacacaaagccaactacttgaaccgacacatcaagaaatcgcagaaacaaacaaacaaagagacaaagaacacagagaaaaaaacaagaaaaacacacacaagagaacagagagagaagacgagaaaggaagagaaacgacaaagataggaacaacagaaaaaaagaagagagaaacagaaaacaaaaaaacaaataacacacagaagaagagagcacagaagaacgcagctagtagaatacataaagnnnnnnnnnnnnnnnnnnnnnnnnnnnnnnnnnnnnnnnnnnnnnnnnnnnnnnnnnnnnnnnnnnnnnnnnnnnnnnnnnnnnnnnnnnnnnnnnnnnnaacactaaaaatttaaactgttccctttaaaaaatgttctaagaaaatattccaaccacataaacatttttgttttgttacatttatagaatagatactcagagatccataaagataagaacaatccaaaaagacccaaacagaccaagagacactcagtgacaggcagagacgcaagggaaggagacacaggctgcgtaccaggagtcttcgtgtgtctactaagtatttcttaagtggccaaatgcggtggctcacacctgcaatcccagcactttgggagacagaggtgtgcagatcacttgaggtcaggagtttgagaccagcctggccaacatggtaaaacaccgtctctactaaaaaaatataaaattagctggacatggtggcgcatgcctgtaatcctagctactcgggaggctgagggagaatcgcttggacccaggaggcagaggctgcagtgagccgagatcacgccacttcactccagcctgcgggacagagcctgaccctgtctcaaaaaaaaaaaaacacaataataatgatataataataataaaataacagcttaataaagaggtaacaaaataaaatatttattaagtgcttactatatactgggcacctattttaagtgctgggagacagatggaaataaatgataccaaaatcctgcctttaaggacagcacagaacagaacagaaagaacgagagagaaagagacagtggaaagatacaggaggaggaggaaaagagacgttgcagctttcgcttctggcacagggacagtccaaagaaacaccatcatttctgagcttgttcctgcaggatccacgcagcattccgaccatctgcccctccccgctgggtcctcatcctacccttgatagccacagtggccccatccactattggttccatctcagccaagagggtctgagagcaggggacgactttccgcagcccacctggccccaccacggccaccaaagcaccttcggggatggagaaggtgatgctgaaacgacacaacacacctggctcagccacgctgaatgaggcctgccgggctaatgcccatggccaccgagcctcaatttaccccaagtagagaaagagaaagacagaaggcaagactgtactaaacactgaaggcctcaacattccttccatttctactgctgagttcagttcagtgacctgtctcagggggcctccaggtgggaggcaggtgacaggtgtcccttagagaagtgaggcagggagtaacctgagggatcctgtcacagtgggcttctggaacagtttttgcccctcggagaggcagaaactttactgggggcatgacgcaaggtctgaaaggagaggacacctcaagacaaactggggccggacacggtagctcatgccagtgctggtaatcccagcactttgggaggccaacgcaggcggatcacgaggtcaggagctcgagaccagtctggccaacatggtgaaaccccgtttctactaaaaatataaaaattagccaggcgtggtggtggcagggcctgtggtcccagctactgaggaggctgaggcacaagaatcacttgaacccaagaggcggaggttacagtgagctgagatcgtgccactgcactccgatctgggcaagagcgtgagactctgtctcagaaaataaataaaccaaaaaactctgacaaaaagcaggagtgtcccacacacagaaacatggggagagccggagaaaggtgtaaaggggtgaaggcacagggtgtaaccagggatgcgatggcactgaggtaggtagtggccagacctgggagcaccttgaaatatgccctggaaggacgctgtgctaagacacctgaactctgccagccgggagccaccaaagggttgaaaagggaaacgcatatgaataaatctgagttgaatttcaggaagatgtctctattgaaatcatcctttaacgaacagccgaaagcaaaataaaataagctcagcattcacccagtaagaccggctgtcaatggggcaggtcaaccccaggccactcccactgccgacggcacctccagagcagggtttccatcctcccagggaagggagggcacatccaaacctttgctggactcacttacatggaatgtgcttttattttttatttatctgtatttagttacttaagtatttatttatttttttgagacaagagtctcactctgtggcccaggctggagtacagtggctcaatcttggctcactgaaacctgtgcctcccaggttcaaatgattctcgtgcctcagcctcccaagtagctgggattacaggcgagcgccaccacatccagctaatttttgtatttttagtacagatggggtttccccacattggccaggctggtctcgaactgctgacctccagtgatctgcccgcctcagcctcccaaagtgctgggattacaggcatgcaccaccatgcccagctagtttttttatttttagtagtgacagggtttcaccatgttggccaggctggtctcagacttcggacttcaggtgatgtgcccaccttggcctcccaaagtgctgggattctgtgctttttaactgccacctttctgatttcagagtattagtggaaatgctgatagtcgttgctgtcactgattgtttcattcttatgacactgctgcatggtgacactcatcaggctttttgttcctgtgctgggaggggaaaggattatggggcctgagtgggcaggaagcccagtgaaacaatacctgccactgtccacgtgagacagtacctgccactgtccacgtgagactgaaatattcttacaggctgatgagagaaaagggttagagaaaggttctgggggctcatggggggaaggtaactgaacaggaaaaccactgggtcaggaaagggacacagatacagattagttgtgcagctcaacaagacagaacagctacaattgaagcaggcaggatttaagttagacataaggaagaacttcctaagcatgcagtacccccatgaattttcaatgcaggccttctacagattgttttctctggagagtttctctccttcatcataaaacacagcagtgatttggctacccaggcatgagctaaacctctaaaagggtcccatcacccctgtgttttgcggattccttaagggggcctaaaaagctgttgatcaaggcctctggtcagaacaaaatgagaggtgcttgacaagttgcctggggataaggtcaatttcctagacatcatgtgctttggaaaggtaaggactgtagggtgtggggtgccagatagaaagctggcaagaaagggtgagctgggcagctgaggggcactggagttcagcagcatcacagcccctgactgagactggccaatcagcacactcagtgtctgaaggcatagtgattgcctcacagagggcacaggacccaatctgggtcaataagaagcaggcagttctcctaacagtgggatacacagtgggagctgttgggaccatttaccatcacaaggggagaggatgcgtgaggataaagcagaccaggagaaagtgaaacaaagaaaatatgaagaaagttctgacggcagagtccctggatcacaccgcacctgaaagtagaacttcccagttacgcaagccaagaatctcctgtattgtctaagtctagctgtccaaggctgctgtaacttacaatcccagggaaccctctgtgctaggcatgtgtgtctgcttctcacgacagcctaagcaggtgtatctgcacccattgtccagatgggtaagctaagtcttagaaaggcaaagtgagttgttcaaggtcacagagagggagcacggtgggaattcgaatccacgtttaacaaaagccctgtggctctctccacaccatcacgtgtgtccacgtcccggcttacccattcagtgtgggagggtcgctcctggcccaggtgaatgtggcattcctcacggtgatgctgttcgtgcccccgcctacaaagcacagagacatgtcagggacaggctgagctgtgcgactccacatgcacagaacactctctttctctgcttgaatggttcaaccccagacgcttggcacgaatggcgctaggcattattatctggtgacatcagccacgggttctgaaagaagaaactcaacctgcagttctggaggcagccccagacccagaaagcagaaggaaactgcaagcagctttgtccttgtaagatggggttgcgccatctggacgatcatcttgggagatgactgcagaggcgggggccgcatgagaattactcaatgctctcgatgccctggcccttctcaggcaggttcggggcagctccagctgggagggccgagcagtggccaaggtcagtgggaaacagctggcgtccacatgcaaacctctctccactggggtggccagcatcagaccgctgggccctccttgaggtgcaaagggaggtcgttcacccttctccccaggtcctctgtcttcctcccccagccacaccactctacacacagcacatcacagcaggtggatctttctaaaacatccatcacgataaactcaaaaaaagaggatacggaacaggaagtatggtacgagggcacagggaaggggagagtgtcggagacaaagcccacgttaactggttccatgtttctgtcttcttctgagacaggatctggcttctgcaaccaggctggagcgcagtggtgcgatctcggcctactgcaacctccatctcccaggcgcaggcgattctcccacttcagcctcctgagcaactgggactacaggatgtgcaccatcacacccagctaattttttttttgtattttttgtagaggtggggtcttgacatgttgctcagcctggtctcgaactcttggcctcaagtgatctgcttgcctcggccttccaaagtgccgggattacaggcatgagacaccatgcccggccagctccacacttctaaagctcctagcacctctgtcttcttttactcttcttcctgttattttccttttacttcatgtctctcacttaaaacaaaagcaggccagtcgcaggggctcatgcctgtaatcccaacactttgggagaccgaggcgggcagatcacctgatgtcaggagttcgagaccagcctggccaacgtggtgaaaccccatctctactaaaaatacaaacattagccaggtgtggtagcgcatgcctgtagtcccagctactcgggagtctgagacatgagaatcgcttgaaaccaaggcagaggtcgcagagagccaagatcgtgccattgcactccagcctgggcaacagagtgaaactctgtctcaaaaaaaaaaaaaaagaaaaagaaaaaacagaaaagcagctctctgaattatgagccaccttaagaccatctggagataatacaggagtattttttgtttaagttgtcaaatgaagaaataacttcctccatgcatcaaaaaaacaaaaaacctagagagagaggaaggtgctggttaacctagattaactttctccctcagctcttctacaagtggacgtggaatgaggaaactgggagttgctatttaaggaatttaagaaaagccactggagacagagaggttgcagagaacggttagcttgggagctgggagcagccaaggggcccccactggctagagcgtgctaaacattccaggaagtccaaccacctaggaggccactattagggcaggaaggaggggctggggtgcgggcggcacccaggggcctaggggtttcctgatgcttgcattgagctgtgaacaacttcagtagcaagaaaccaccccccacccaccgccggccacctcaaatttcagcctgtggttagcagagaaatttgaccccagagtagatggaatcattgccttatgatgtgaggggatgtggacactgggacagcagaaaccagatgaccacagcccaggagtgttgggaggaagagtccagcatccacttgggccacggttctcaactggaggtaactgtgtccctcaaggcacatctggcaatgtctggagccatttttggttgccaaaattgggatggatactactgtatctaatgggtagagtccagggttgctgctcaacatcccacagtgcacaggacagtccccaaccacaaagaacaatgtgtctccagatgtcagtagcgcccaggataaaaaaccccacaccagggggctgagctgaagatgctgagaccatctcgctcagaccagagaagtgacaactcccaggatctgtttatcatcttctatgcaccaggtgctgtgtcaaacgtgtcaaacgttttaggtgccactaaagatacctgagcgcctgcgaggtgccagacacagctcacgcggtataaccgacgtttacacacattcaatcttctgacattggactctggagccagactgtatgggtttgaatcctggggctaccacttcgtacctgggtagccacaggcaagttagttaacttctctgtgcctttgtttgtttgttttttgagacagggtctcactctgacacccaggctggagtacagtggcatgatcatagctcactatagccttgaactcccgggctcagccaatcctcctgcctcagcctctcaagtaactaggactacaggtgcaccaccatgcctggtgaatttaatttttgtagagacgaggtctcactacattacccaaggtggtctcaaactcctggcctcaagcaatcctccagccttggcctcccaaagtactaggattataggtaggagccactgcacccagcctgtgcctcactttttcatctgtaaaataaggctgacaatcatgcaatcaacttcagagggctgtgatggggtgtctatgaggcagtgcacacagagcacttctcacaatgcttggcacatagtaggtgctcagtaaatctcagtgaggcaacaccctatggccaggaagagcatggactctaccgatgggctgtgggtgtgaatgctggttcttcttttgatcagctgtgcaatctcaggcaagtttcagagaccagtttcttcatctggaaaatgggggtttccatcaccctcctccaggggtaccatggtgagtaatggacaagttgggacattgacatccttggaatggcatgtgcatgacagaggctttataagtgaacgtgtcactgcacttagtgccattaatatttattattattattatttttttttttttttgagatgaagtctcactctttgccctggctggagtgcagtggcgcgatcttggctcactgcaacctccgcctcctgggttcaagtgattctcctgcctcagcctcccgagtagttgggattacaggtgcccaacaccatgtccagctaatttttgtattttcagtagagacggggtttcaccttgttggccaggctgatctcgaactcctgacctcaagtgatccacctgcctcagctccccaaagtgctgggattacaggcgtgagccactgtgcccggcctaatatttattattaagtgcctagagagatggttacaaacaacatccctggctcagggggatgggctgggaaacgataaattaacaagctacaaaacaaacaaacctgccaataaaaatgcatggccaggtgcagtggctcacatctgtcatcccagcactttgggaggctgaggcagagggatccttgagcccaggagttcaagaccaacttgaggaacaaagcaagaccttgtctctccaaataaaacaatttaatattgaaaaaaaaaaaaaaggccacgagaactggctcatgcctataagcccagcactttgggaggctgaggcaggtggattgcttgagctgaggagttcgagaccggcctggacaacatggtgaaaccctgtctctacaaaacataccaaaatattatccaagtatggtgctgtgtgtgcctgtagttctagctacttgggaggctaaggtcagaggatcacctgagcccacgaaatcaaggctgcagtgacagctgtgactgcaccactgcactccagcctgggaaatggaatgagaccctgtctcaaaaaaaaaaaaaatccaagtaacactcagccaaagaaaggtacttttgtttcccttatctagataaaactgaggctcagacctaagtctacacagcttgtgggtgatggaggctggccagcctccagagtcctcatttagcccagaatagaatcaaggtcaaagccttggaaagtgactcccacggggaagcctcaagcagctgctgaccctcagcaagaaaacaaaaatgcaagtgcaagttcaccctcctgggaagtgtgagacaggacagaagcccaggaggccaggcttcccttcccttctgcaggctctgcagaacccttgtcccccggggtctcgcagacaagcggctgggcagagtcaaacctgagggcagccaagggaaagaaatgcaagtagggaggacccagtgggagatgggaaggcggccacttccagaagccaggactgaacacacacacaccgtctttgacaggccgtcgctcgatgctgtcaggttccagctcctcatgggagagaaagatcctcaggcgtttgagggagacactcgcctgtacagagagcaatggcaggggagagttatttttaaaaagcatttttgcaaaaccaaccaaggttaactttcaagggtttccccaggtgtggaggggcacacaccctcccttatttctgaaggtcccacatttcttagaaccagtgtatactttagaattaaacaaaacaaaaaaagaaacaggtttggttctgctttgttttaaaagcccacaaaaggtatttcagaaaaaatgggcgaatggctgggcacggtagctcaaacctgtaatcccagcactttgggaggccaaggcaggcagatcacttgaggtcaggagtttgagaccagcctggccaacatggtgaaaccccgcctcagctaaaaaaaaaaaaaaaaaaatacataaaattagcctggcgtggtggcacgcacctgcaatcccagctactcgggaggctgaggcagaagaatcacttgaacctgggaaggcagaggtcgcagtgagccaagatcatgccactgcactccagcctgggcgacagagtgaggctccatttcaaaaaataaataaataaaaataaaaataaaagaagaaaagggcagaggcctggtggaaaagggactctggaaacgtaacagcaaatgcaacagagccaattcaaacagcccaatgggacaggcatttctgagatattccagaaaacttggatatgggctgagtattattgtaaaaacttattgttagtttgcttagacatgatgatggtattacattatgtaggaagaaatgcatgctgaaatatttgtgggtagaatgtaaggggtctgagatttgctttaaaattattcggcaaagaaaggaaagaatgaagggatagatagcagagtttagcattaaaaacaaatgaagggaaagagggacaagggagggatactgaaaaagaatgagataaatcaactgtggcaaaatgttttgggtttttttgttcgtttttgagatggagtctcgctctgtcacccaggctggagtgcagtggcgcaatctcggctcactgcaagctccacctcccgggttcacaacattctcctgcctcagccaaccgagtagctgggactacaggcacctgccaccacacctggctaatttttttatatttttagcagagacagggtttcaccgtgttagccaggatggtctccatctcctgacctcatgatccgcccacctcggcctcccagagtgctgggattacaggcatgagccactgcgcccaaccttggtttctttatttgagacagagtcttgctctgttgcccaggctggagtgcagtggtgcaaacataactcactgcagcctcaaactcctaggctcaagcgatccttctgcctcagcctcccatgtagtcactgcaggcgtgcaccccacacccattttgttattttttgtagagtaagggtctcattgcccaggctgattttgaactcctgggctgaagcaatcctaccacctcagcctcccacagtgctgggattacaggcgtgagccactgcgcccagccaaaaaatgccgatgttgaatctgagtgatgtgtacacggggttcatgttgtattatttcctttcttggagactgagtctcactcagtcgcccaggctggagtgcagtggcacaatctcggctcactgcaacctcggcaacctccacctcccaggttcaagcgattctcgtgtctcagcctccagattagctgggattacaggcaccaaccaacacatctggctaatttttgtatttttagtagagacaaggtttccccatgttggccaggctggtctcgaactcctgacctcagctgatctgtctgccttggtctcccaaaatgctgggattgcaggtgtgagccatcatgcttggttttttttttctttttctttttcttttaatgccagtttacaaactttaagctattctacttctgtgtacacttgacatttttcataataaaatggatttttttgtttttgacaaagcctgctatcagccttgtactaccaaattttacggttgatttgcctatgtagttaaatggagttttcaaaagggatgttcgcaatgctcggaaaaagaatgtgaaaacagtgcagaaaagtgacaggagcttccagtagtgcccaagtgtgacaaaacagaaagccacccctccttacacagtcaatggcaggaattttagagattctacagggtctacattgtttctaaaaaataaaaacaaaaaacaaaaaaaaacagggtcttactcccttcacccaggctggagtgtagtggtgagactatgactcactgcagcctcaacttcccaagctcagctgatcctcccaccccagccttctgagtcgctgggagtacaggggcacaccaccatgcctggctaattttcaaacatatatatttatttatttatttatttatttatttatttttattttattttattttttttttttttacatacagggttttaccatattgcccaggctagtctcaaactcctgggcttaagagatccacctgccttggcctcccaaagtgctgggattacaggcatgtaccatcatgcccggccgtaaggttggggtttttcttttttttttttttaattttgagacggagtttttgctgtgtcacccagactggaatgcaatggcacgatcttggctcactgcaacctcttcctcctgggctcaagcaattctcctgcctcagccttccgagtagctgggattacagggacccgccaccacacctggctaatttttgtatttttagtagagatgaggttgcactatgttggccaggctggtctcgaactcttgacctcaggtgatctacccgcctcagcctcccaaaatggtgggaatacaggcatgagccgccgcgcccggctgtaaggttggggtttctcaaagcgtgggtggtcaagacctatcagtgggttgtaaaatcaatcaagtcagacaagagctacattttttaaaaaaaggataggaatggcggaggaacaggctgaagagaacagagtatttcggaaagattcttccagagcatgggaaagccctgctgcattaaacttgattcatatactcaagtgcgagttctctgtcaagaagtcaaatgtgttttctttctttcaggcatgaccagacgaaagcatggcagcctttgtccgggcctcatggagcccaaccgggagtgtgatctagaggctgcgctcgggggcacttccatgctttcgtggcctagaaccccaaggccccctctcggaagtcgccccagcttccccctgtacctgcacgatgctgctgatgaccatggggagaatgttcaggggaaaccggaggatgttgaacaaggccaaagacacgaaggctgtctgggcatccaggatgttgttctcgtcaatggtcacgtagacggcaaatgtgcacagggccacctgcaagcagaacgcccagtgctgactgctgtgccctgagtgagagtcatcatcctaggagcagtgacaggccctggagacgcgcttgggccctccccaggtggccacaactgaccagctgctggagctcgtggaaaaacctggggcagtatctggcacatggcaggtgctcactaaacactctgggaatgaactggataaatcaacgaccgggagcccaaagagccggcctctcccatcaactttctcagagatgtcctagaggggcattcttagtattcctcaaaagcaccaagcacaatccccaagccaggcctttgcccctgacgtttcctctgcctgaaaccatcttccatccagggggccacctgactcctccctctcaccattcaagggagctgtctctcccactttacccaaatagccctgccatctggccatcggcccatgtattttcagggtctcagcactgccatttcattgttacttcctggaaggtcatacagcttaaaaataaaaaccatacactttgccatatttccgctgtgggaccctggttgagttatttcacctctccaggcaagcccctattttctcatctataaaatggaagtcatgataggcttttaagggctgttggcacttatgtagggtgtttatttgcacagggcccaagcacagtaaaactcaacagatggcagctgtttttatttcttgttggaagatttggtccaaattccttagatcattcttccaaggaatctattaacgtggtcacacaagcgagagcccggtcccacgggaagccagagctggttcgtgttctggctctgacattaacaagacagatgacgctgagccatggcacagaaattttccaggctccgatgtcaagagggaggcaaggtgctcgaaacgacagggacgcatgatccctgggtgcagtggtgcaatcatggctcaccacagcctcgacctcccgggctcaagcattcctcccacctcagcctcccgagtagctaggactacaggcgcataccaccatgcccggctaatttttttatttttgtagagacagggtctccctatgcttcctaggctgttctcgaacacctgggctcaggccatctgcctgcctcggccacctaaagtgctgggattacagacatgagccactgcacccatcctggctcccatcttctaagcggtaacgcaacactggcatcttacctaaagatacttttttttttttgagacacagtctcattcttttgcacaagatggagtgcagtggtgcgatcgcagttcaccgcaacctctgcctcccaaggtcaaacgattctcatgcctcagtctccaagtagctgggattacaggcgcccaccaccatgcccagctaatctttttgtatttttcttagtagagatggggtttcgccatgttggtcaggctggtcttgagctcctggcctcaagtgatccgtctgcctcggcctcccaaaatgctgggattacaggtatgagccaccatgcccagcccagagatattctttactcgaaagggtctacatgtatctacatgatagacttctcaaccataaaaaggagtgaaattcttatacatgctaaaacatggataaaccttgaaaacatcatgctaagaaaccagtcagatggccaggcggggtggctcacacctgaaatcccagcacttcgggaggctgaggcgggcggatcacttgaggtcgggagttccagaccagcctgaccaacatggagaaactccgtctctactaaaaatacacaattagccaggagtggtggtgcatgcctataatcccagctactcagtaggctgaggcaggagaatcgcttgaacctaggaggcaaacgttgtagtgaggcaaggtcatgccattgcgcttcaggtgggcaacaagggagacacttcgtctcaaaaaaaaagaaaacagtcagaaaaggccacctgttgtttgattccatttatatgaaaagtccacagtagataaacagagacagacagaaagcagattactggttgcctggaatggaatggaagatttggggagcaactggtaacaggtacagggcttccttttggggtaatgaaaacgtcctggaattagtggtgattgtcattatcatttatacaaaaaaacccactgggtgaccttcacaccaccacacatcacacaaaaaaaccactgaattgcacacttttaaatggtgaattatacctccattaaaaaaatacatttcgatcggcatggtagcccatgcctgtaatccaaatgctttgcaaggccgaggagggaggatcacttgaggccagaagttcgagcagagccagggcaaaaaagcaagcctgtgtctctacaaaattttttaaaaaataagccaggtggctgggctcaatggctcatgcctgtaatcccagcatgttgggaggccaaggcaggtggatctcctgaagtcaggagttcaagaccagcctgtctgacagggcaaaaccctgtctctactaaaaatacaaaaattagccgggtgtggtggcatgtgcctgtagtcccagctactagggaggctgaagtaggagaatcactttaacccgggaggtggaggttgcagtgagccaagattgcaccactgcaccccagcgtgtgcaacagagcaagactccgtctcaaaacaacaataatattaataaataagtcaagcatagtggcatgcacctgtagtcctagctactagggaggctgaggcaggagaatcatttgagcccaggaggtcgaggctgcagtgagctattactgtgcccccgcaccagcctgggtaacagagtgaggcccccatctctaaacaagtaatttttaaaaaagtacctctccaaagtcaacctatttttcagtgtagaagtcaaagtgctgactcggatcccaaggcccagctgatttgtaaagtcccttccccgtacctcatttggcgtcatctgtcactctcccctcactcccactgtttcagcctccatggttatcccacctatgaatgggcacagtaatgccccagggcctttgcacatgctcttgctactccctggttggcctctttacctccatcaagtctttcctcaagtgtcaccttctcagtgagcttggaccaccctacttaaaactgcaagccgcccttattccaaagatctgactcttttctttctatagcacttaggatggctttctctagcactaggatttatttattgtgcctatttttccttgtctgtttctctccgtgaaaaatgaatgttccatgactggagattattacctgtagtatgcactgctgtattgtcagagcctaggacagagcccagatcatggtgctcagtgaatgtctgctggatagataatggatgggtgggagtggataaatgggtggggacggggtaggtgaatttgcctgagggcagaagagcacatcacaggtgtctcttcagcagtgaagcaaaccaggcctcaggcatctcaccaccaaaacgtaccagcccccttggtgagccaagtaccaatcgatgccggctgctggcagcacagggcacacacagagaggggacaggacaacatcatgcggcccctttcaggtccatggtcctggcttctccagaaggaggaggtcatctagccatccacccctcaggtggtaactgagcacccatcatgcgctggggactgaggtgggcttggcaaccctgagacgcacagtctagtggaagcacaggctttaacaggttccctgcaggcagtgtttggaaatccgaagaggctggtaggacgggcacaatgactggggctccaggcagcaggagactggagttcgccttgtaataggcgagggtctagggtgcaaaagcccttcatacacagtgaggagcacctgtcccctaggtgccttttctgagaaatgtggaaaaccaatgaatggaacccctacactccagcccactccctaaaaatcctgatgccctgtgtgcagttacctgctcttcctgcctacctggcatctattactctgtttatggcaacatgcaattttctctgggggaactgaacttctcccagtgtcaacctatgagcttcagccacagatgaacctcctccctcaccccctaccttggccccaagccctgaaagacatgacctagccctggctgacccaagcatcctatctccctggcctcagtgactggctcaggaagaagcatgtgatcgaccacaaccaatgagactcaatcccatagctttgcaggaaatattaggggaaaagagtaagactctctgttcacaggggttgctgaggtgacaggatgatcaggaaactaccagctaataaagaaaccaccatcaagaaagcagagctgagagtcagagacgttgttattcccaacattatcttgggaactcctagatccagccatgcctggaaccccattcatgcttaaaagtctttttctagactttttagttttgtgactcaaaaatccccctcttctcttactctagttgatttaagctaggtttctgttatttgcaagacagttcctaattaatatgatttatttcaacctctcattcattcatgtatttattcatttacctacatacatttacagagcatgaactatttgccaaggtccctatgctttgctggtacaagcacaaaatgacaaggtctgactgggcatggtagctcacacctgcaatcccagcactttgggaggccgaggtgggcggatcacttgaggtcaggagtttgagaccagcctggccaacatggtgaaaccccatctctactaaaaagacaaaaaattagccaggtgtggtggcgcacacctgtaatcccagctcttcgggaggctgaggcaggagaatcagctgaacctgggaggtggaggttgcagtgagctgtgattgtgccactgcactccagcctgggcggcagaatgagactccgtctcaaaaatacagaaatgtataaatatataaataaataaaatgacatggtcgtggcagtgtctccatgggccctaggatatgatcagcagagaactacaggacagatcattaccatagagaatgatgaattattctaacaaagggagattcagggtaaacagaaggcaagaagctcacaaatcatccaagacagaaaatgttaaatattgacggctgcctggcgatgctattttaggaaagtgcattaggtggacgtggtaaatgccaggtttgccattccagaaaaacagtcccatcagtccctggatggcatccctggccttccccggcctctgtgttccatcacacctaccgctgggtaaacacctcatcgtctttgaagcacaggaatgcacaccagtggaaaaaacactcaggcaccttccaggggaactaaaggccacatattttatcctaatgtagtcagaggcttcgatgcctcggccaggacaaggtctccccagctgacacccaggcccatctgtttcttgccaaacagctcaacaaactctgtctctggaaactccgggaaactaaatggcaagaaagctcaagaaaaggttaagtaaagccggtagccgggctcagtatttcacatctgtaatcccagctactccagaggctgaagcaggaggatcgctttagctcaggagttggaggttgcagtgagctgtgatcaagccactgtactccagcctggacagcaaaacaagaccctgtctctttaaaaaagaaagaaagaaagaaaaaagagaagaaaagccagtcctgctcttaagcatcttctgctgtggtttcctaatggggaacagggcaggaagtgataagcaaagtttggtgacagcctggaaactgtgggttttgccaacgaatccaatgtgcagagcaaaaagctgtgagaacacgctgcccatcccctcctaagcgggacacaaggcacagaccaaacctcatcaccagcgccctctggcttgtatcttttcctctgagacaagacctttcaaaatgccatcaaggccaggtgcagtggctcatacctacaatcccagcactttgggagacagaggcaggcggactgctcgagctcaggagtttgaaaacatcctgggcaacaaagtgagaccctgtctctgcaaaattacagaaattagctgggcatggtggtgcatgcttgtagtcccagctgcctgggaggctgaggttggaggattacttgagcctgggaggcagaggttgcagtgagccaagatcatgtcactgcactccagcttgggcggcagtgtgagaccccatctcaaaaaaaaaaaaaaaaagaaaaaaagaaaaaaaaagccattttgtatgtatttatgtatgactcttactatcacttgtataaaagtaaagtaaacagaatcaagtaaccataactacatgtatgacatgtatccaccattacagtgatacagacgtggactctggaaaaacacacaagaaacatggagagagggaagcaaggtgactggtgttaggaggaagggcttgggcctttcactattgactgtggttctcaactgggagaattctgtcccccaaggggacacttcgcaatgcctggagccattttctattgtcaccactgggaagaagagggagaggtacgacttagcatctggcaggtagaggccacagatgctgggaaacatcctgcaatgtgcagtccaggccctacaacacagggacaaaggatgacctgttggcgaatgtcagcaggctgaggtggccacgtgcgaagtccggctgtatgaataccatctggtgcagctttaattatgtttcaccatatgcaaatacattacttcctactttataaagtaagacccaccgggcatggcggctcacacctgtaatcccagcactttaggaggccgaggtgggtggaccactagaggccaggagtttgagaccagcctggccaacacggctaaaccccatctctactaaaaatacaaaaaattggcttggcatggtggcgtgcgcctgtactcccagctactcggacgctgaggcaggagaattgcttgaaccctggtgaaaccccgtctctactaaaaatacaaaacttagctgggcatggtagtaggcgcctgtaatcccagctactcaggaggctgaggcaggagaatcgcttgaacccaagaggcagagattgcagtgagctgagatcgtgccaatgcactccagcctggcgagagagcaagactccttctcaaaaaaaaaggagagtccaggcgcggtggctcacgcttgtaatcccagcacgttgggagatcaaggcaggtagatcacttgaggtcaggagttcgagaccagcctggcgaacatgacaaaaacccatctctactaaaaatattaaaattaacaaggcatggtagtgcatgtttgtaatcccagctagtcggggggctgaggcaggagaattgcttgaactgggagatggaggttgcagtgagctgagatggcaccactgcacttcagcctgggtgacagagtgagactcagtcccaaaaaaaacaaaaaaagagagagttcatcaacgcaccccggtaaagtacaaggtattggagtgtaagaagaatgcaatgtacaaggcagaatgcaggggcattggagctggaagtgatcttagggaacatggagttacagaagggcaacaagatgtcatttcttgctcaactctaggccactggcaccagtcacctggagggctgcttgaacataactcagtgggaaagaaccccatgagtgactgtgggtgtctgctgtgggcatgaggaaggaggacagggcccagtatttgacatgcttggaatctaaccccttcattttccatgtgacaaaatctagagccagcgaggtgagatgaccagctttggggtcacactgtgagctggcagtagaatgtggcaggtgtcctgattctcagaagaacattccagtcctctaagccaggggctggccaacaaggatggctcaggtccacatttggcccacacctgtttacatacggcccatgagctcagcattgatttcatttttttattttttttgagacagagtcttgttctgttgcccaggcttagagtgcagtggcgtgacctcagctcgctgcgatctccgcctcccgggttcaaacgattcccgtacctcagcctcccaaaaagcttggatgaccagcatgctccaccacacctggctaatttttttttgtggggggctgggagggggtgggggggcagcagcaggaaagggtctcactctgttgcccagccaggagtgtgtggcatgatcttggctcactgcaacttctgcctcctgggttgaagcgatcctcctgcctcagcctcccgagtagctatgaccacaggtgcgcaccaccacttccagctaatttttgtatttttagtatagacggggtttcaccacgttggctaggctggtctcaatctgctagcctcaagcaacccgcccgcctcggcctcccaaagtgctgagattacaggcatgagcccctgcgcccagccagatttcatattttttaaaagttaaaaaaatcaaaacaatattacatgacacatgcaaattctataaaattcaaattttggtgtctctaaatacttttttacaggaacacagccacacccatcgatttccatattatctaaggctgtttttgcactacgctggaagagactggtatttgtgacagagactgtatggcccggaattccgaaagtatttacagaaaaagtttctttactcctactttctgccagtctctctcgaaatttaatgtgcatacacaccacctagagaactagttacaactcagattccgtttcagtggatctgggctgaggcctgaaattctgcaccgttaacaagcaccaggtgatgccatggctgctggtccacggaccagactttaggcagtgaggatccactccggtgtctctacatgtcgacctgaaccagaagcagcagcacctagggatatgttaggaaagcaaatactcaggccccaaccagacctactaaaactgaaaatttgggtggggcccagaaagctgagttttatagtaacaagctaacagccagcactgtggctcatgcctgtaatcccagcactttcggaggccaaggcgggtagatctcctgaggtcaggagttcgagaccagcctggccaacatggtgaaacaccatctctacactaaagatattttaaaaattagctgagcatggttgctgcatgcctgtaatcccagctactcagaggctgaggtggaagaatcgcttgaacccgggaggcagagattgcagtgagccaagatagtgccatagcaatccaacctgggtgacagactgggacttcatctcaataaatgaataaataataaaatataataacaagctctccaggtgattctgatgcaggcttgaatttgaacaccatctctcctgcagttccagaccctgagagaagtaaggcaagactaagaaaattcagtgggagcatgaacacgctttcgcaaatgctgaaacagctggagcttccttagacattccacctgaaactcaacaaagatgaagcagatggtagtttaacagaaaagttcatattcataaacatgtttaactctgcttcacagaaacttgccagaaaaacatataatttgccaacctgaccaagggaggaatagttgtaatgagcacaacattacaaaaagaatgacacagttaataaaaagacagaaagaaaaaacaaacatggggcatgatctgaagtcatccttcaccattaactgtttttaactgtgcttaaaaagggaatttccaaagtccatctctgtatggtctcctgatttgcggccaactttgcaaattgtaagttgcactgttgtctttaaacttttcaaagccagctaggcagggatagacccattaccataccccaggacaggtaccagaactttcagtgtagcatggatcataacagcaaaaaaaacagggaacaacctgtttttgcaaggaatgggagaaagggtaattccagcagggcgcatctgcacgtcagacaagcatccatcatgaacacaaatgaaacaagctgggagtggtagcagtgcacctggagtcccagctacttaggaaactaaagcaggaggattgcttgggcccaggagttcaaggctgcagtgagctatgatcgcaccacagtactccagcctgggggacagagcgagaccccatttcaaaacaaaaccccccaaaaaactaaaatgaagtagaccagaatgaacgaaccaagactatatattgttaaccaaagaaaagagaacactatgtacagtatgattccatttatatctgtcaaagtatttttaaatacctatatgcttgtccatttttctctaaaagcgtacacgaaactgtcactttagaagggaggaactgatggaagagaggacaatatacttttcattttatatctttctgtatttttttttttttacaatggatgacaatatttgttcagcacctgctatgcactgttttatatactgaggatacagcagtcaagagaaacgacaaaaatgcccatctggagctgacatcctagtgggggaaaagcagacaataaaataagtacattttattttacttatttttttttttttttacttttttgagacagggtcttgctgtgttgcccaggctggagtgccgtggctcgatctcggctcactgcaacctcagcctcccaggttcaagggattctcatgtctcggcctcctgagtagctgggaatataggcatgcaccaccatgcccagctttttttttcttttttttttttttttttaagcagtaacagggtttcaccaggttggccaggctggtctcgagctcctggcctcaagtgatctacccaccttggactcccaaagggctgggattacaggcacaagccaccgcacccagcccaaaataagtaaattttagagtgtgtttagaccatgccacttgacatgtggcctatgagacactgacaatccacactttgtgaccagttggtgacaaaataaggacgcagcaccacaatgtagatcaactatggcaccaagcgtgccgttcgactcagctcgcactttttgtcttgcaaggctatcttaatgcaggaagcagggggcactggtttacattctggcacaagctccttatatcacagtaaatagataacgaacggttcctacacaggttggctagaagctgctaagtgtgaataaaacaaaggagaatggagaagatggcaaatgtttaaaccaagtgttcagggaaggccttgctgacatagtgacttttttgtttgtttttgagacaaggtcttgctctgtcgcccaggctggagtgcactggcgtgatcttggcccactccaaccgtcgcctcccaggttgaagtaattctcttgcctcagcctccctagtagctgggactacaggcatgcgccaccacacccggcttatttttttgtatttttagtagagactgggtttcaccatgttggccaggctggtcttgaactcctgacctcaggtgatccacctgctttggcctcccagagtgctgggattaccaagcatgagccactgcacctgggcaacatagtgaccttttaaaaatattcaggtacgcagagaaaataaaacatcaaacaatgagggccaggaaaaatgtggcttcactcaccagaaagggcgtgcagacccaggtgaaggtgcccacggctgacaggtaggcagacttcttcagcaccttcagctcctcctgcctgatggccagcaccttgtccttgaatgccagctcccaggcataaagctttagcactttgatcccattgagaatttcgttcatcagcttgatccgattgtctttgctcttcatgtgggccaccttggaagagacgggcagtcaacacatctggggcgaccctgggatcagcccatcactcaacatcaccagctatttttttcataaactttattatatactttgacatgtaaatgttttttatattgattttttttttttcttttcaatagagatggggtttcaccatgctgcccaggctggtctcaaactcctgtgctgggattacaggtgtgagccaccgcactgggcctcaacttcaccgtctattaaaaatgggcctcctgagggtgggagagctgaccctgtaatccctactagccctactcttgagccccaagaccacaccaaaggaccccgctatcaagaaaaaaaaaaccccttcaaatcacgttaggttagacattggagaaacatactcaatttagaatccaggaacagaggcaagaaaaacccttcaggtgtacagaaaagaagggattcagtccctactctgctgacccaaacacaggagacatggtggtggtgtttttcttctctgttttcgtattttttcttttttttttttgtgacggagtctcgctctcttgcccaggctggagtgcagtagcacgatcttggctcactgcaacctctgcctcccgggttaaagagattctcctacctcagcctcctgagtagctgggactataaacgcctgccaccacgcctggctaatttttctatttttagtagagacggggcttcaccatgttggccaggctggtttcgaactcctgacttcaagtgatccaacctcggcctaccagagtgctgggattacaggtgtgagccaccgcacccagcctgttttcttatttcttgtcagcccagttttctttttttttggaaacatcatctcactctggcatcaggctggagtgcagtggcatgatcatagctcactgcagccttgaattcctgggctcaagcgatcctcccacctcagcctccttagtatctgggaccacaggcatatgccaccacacccagttcatttttgtattttttgtagagatggcaccttgctatgttgctcaggctggtcttgcactcctggccacaagccaacctcctgcctcaggctcccaaagagctgggattacagacatgagcccctgtgcctggcccatggttgttaaaatagtgaaatgtttctgtactggctagcactggttccaaatagtggatacttgtgcagtgcagttgttaaatacttttactaccacccaggattttgtgtatcccagcaacttttctaagcattttacatgtattcagacacttaacaatcacaagaactcttatcgtttagtgctacagtcatccccgggtcacagatgggaagaatataagctacatgatctggaggccagggactgaaatgggttgagtcgggccactcagggcatcctacacatcaagagactgaagggtgactcaatcctaaagcccctgcctcacccatcccacccaaccctaccacgtgaggcctctccttccaacaggcccatgtcctgaaactcatctccctgtggtatcgtcagtgcagcctagtgctcccatttgaaattccacagcacaccataaatatccatcaacagaagagcaaagaaataaactgcaccatctccattatagaccaaaaggcaccgggttggaagaatgaattgaagctatacggcacagcacagagaggtccccaaagcagggcgctaaaggacaaaaatcatgctgccacgtgggcccatttaggtaaaaacagatatggtaataatatcacacacacaaaacatatataatggccaggcatggtggctcatgcctgtaatcccagcaatttgggaaggccgaaggcgggtggaatcaattctgaggtcaggagttcaagaccagcctggccaatgtggtaaagcctcatctctactaaaaatacaaagattagctgggtgtggtggtgggcacctgtaatcccagctgctcgggaggctgaggcaggagaactacttgaacccgggaggcagaggttgcagtgagccaagattgtcgactgcactctacctgggcaacaaagtgagacctccatctccacaaacaaaaaaaaaaacccacatattaaaacaaaccaaactatccattaatcaggtctgtatatacatacgtagaaagttgtaaagatttgcttctatatatttgcagtggttgagagagtaggaagggggtatccccttttaatttatgtacttttgtcgatttaaacttttttttttttttttttgagacagggtctcactctgttgtgcagtggcacaatcatggctcactacagcttcgacctcctgggttcaggtgatcctcatgcttcagcctcccaagtagctgggactacaggcacgcatcaccacatgcagctaacttttccatttttggtagagacaggtttcaccatgtttcccaggctggtcttgaactcctaagctcaggcgatccacccaccttggcctcccaaaatgctgaaattacaggggtgagcccggcttgatttggacttttttataataagaaacatcactctattacttgggtattcaaactttttaaaatacaaaatatctccaaaaataaaaagctgaaagccgggcatgatggctcacacctgtaatcccaacactttgagaggctgaggcaacaggatcacttaagcccaggagtttgagaccagcctgggcaacacagcaaggccccattttagaaattaattattttaatttaaataaagagattaacagcatgtatcctataaggtaagagctaataagggggaaaaaagtagggggtaatttgtactcaactcttgaaagctgagtcacacatacacataataaacaagaccgtgggaaacaaggactttctcagaggctcacagaccttctgattccagtcaccggcctacaaggtctaaccatgtgtcaggagctctcaatcttggctgcccaatataatgacctgggaagctttaaaacatcttgatgtccagaccccacccacaataagtgaatcagaatcccagatatgcagccggggcatcagcatttgttaaggctccccaagtgagtccaactggcaggcaaggctgagaaccccagggacagagcagaaggaactggactaaaatcctcatggagaggcctctgcctagggcccggcttgggggcccgcagagacacatgccttacctgatacgtcttggtcttcatcgccatcacagcattgacgggcaccatgaggaccatcaccgccactccagccaggacggaagggcccagattctaaggaaggaaaggagactcttcatcactcaccagacagaagaaaacagggcccgtaacagcttccccggttgatccatcccacgtggatgctgctgaccaagttcagggcaaggtgtgttacttttaccccacaatagggtgttaagagcctgtggtttcattcctgagcatctctccaggtcctcccaatcccttgaagaataagcaggtccacgctcctttctcccaagcccttggggccacatgagttttgcaaattacaactgcaggattctaatttttttttttttaggagatgaggtctcgctatgttgcccaggctgacagtacagtggctatttgcactcagtgatcctcctacttcagcctccaaagtactgggactacaggtaagcattaggtcttgctacattgcccaggctggtctccaactcctgggctccagcgatcctcccaattcagcctcccaagtagctgtgactagtcacatcaccatgcccagctaattttttaggttttttgtaaggacaaggtctcactatgttactcaaactgctctcgatctcctgggctcaagtgatcctcccaactcagcctcccaagtagctgtgactacactcacaccaccatgcccagctatttttttgattttttgtagagacaaggtctcactatgttgcctaagctggtctcaaactcatgggctcaagcgactttcccacctctgcctcccaagtagctgggattacaggcgcgagccatcacacccagcttagatttttagaaaggtaataaggtagtaagcagaaaagtgtgaacacgaccacctgattgcttttcctgcttgaaggctgcttacaagtttagcccttggctagtgtctgcatacttacagggtttccaccattaacagaattgggtagagtagctcagtgtgcctcaactgtttgtacaaacaatatggtttatgctgaacaccgctttccctctgggagtctagacttttggtatgtgccaagcaaaggctgcttatgtgacctgcccctaatacaaacccaggaactgagctcctaccaagcttccctggttggcaacatttcacacacataatcatcatggttgccagagaattagtgaacctgtgactctgctggggactcctggaagcctgcacctggcttctcttgaacaccgccccatgtgtgccttaattccttgctaattttgctgtattaacttatagccttgtggccaggtgcagtgactgacacctgtaatcccatcactttgggaggccaaagtggtaagatagcttgagggtagaagttcgagaccagcctgggcaacacagcaagacccccatttctacaaaaaaataaataacttagccaggcatggtggcgtgcacctgtagtccccagctagatgagatgacaaagtgggaagactgcttgaggccaagaattcaaggctgcagtgagctatgatcgcaccactgcactccagcctgggcaacagagcaagactctgtcccttaaaaaaacaaaaaaaacaataacaagaacaaaaaaaaaagacagcccccacaacaaagaactgtctggccccaagtgtcaacagtgctgagctcaagcaactaccatctaaaacaaaacgtgatgttagacaattttcttaacggttcataaaccaatcctgaaggcagttctagaacaaatgttccaaaaatatttttcccatagtagcacttttacaaaagtggactccccaagaaccaacctgcttgaaaaagacactttaatttagaatttttttttttcttctagagacagggtcttgccttgtcacccaaggtaaggagtgcagtggtgtgatcctagcttactgcagcctctgcactcctaggctcaagcaatcctcctgcctcagcctccacggtagctgggaaccaacaaggtaaggcaaccaaccaatgcccaagctaaaatttttttttttttttttttttttgtagagacaggtctcactatgttgcccaggctggtctcaaactcctggcttcaagcaatccttccacctcagcctcccaaagtgcaggggattacaggcgcatgccacctatatctgtacccagcctattagacaattaaattctggtgttttttctgagttttattattagaaacactttactcaccttctgctctacaaatgtacaaaaaaaaaaccaaactacagccaaataaaccagtaattttttcttcttcctttttcttttttttgagacagagtctcgctctgttgcccaagctggtatgcagtggtacaaactcagctcaatacaacctccgcctcccggattcaggccattctcctgcctcagccacccaagtagttgagattataggcatacaccaccatgcctgactaatgtttatatttttagtagagacggggttttgccatgttggccaggctgctctcctggcctcagatgatccacccgccttggcctcccaaagtgttcagatcacaagcatgagccatttcgtccagcccttctctttcaataacagataataatttgagctgtgcccattatgcatcaggccctgctggggttgtacccacagaagacacaaaagtcagctgctatatgtctgcaagtagctaacatgttacccttcaaagaggaggcagtacactgagcatgcaaaaaaaacaaaacaaaactatttcagggagtgggctgggcacggtggctcacgcctgtaattccaacactttgggagaccacagagggtagatcacctgaggccaggagttcaagatcagcctagccaacatgatcaaacactgtctctactaaaaatacaaaaaaaaaagaaaatttaatgggcgtggtggtgtaagcctgtagtcccagctactcgggagactgaggtaggagaattgcttgaagctgggaggcagaggttgcagcgagccaagatggcacaccacactccagcctgggcaacagagcgcgactccatgtcaaaacaaaaacaaaacaaaaaaaactatttcagaaagtattattagatgagttcctatactaaagttattgggactcaaaattcaaaagaagaagtccatctaattgagaagggagggtaaatcaatggaagtagtgtttgttacagccttgggggatgagcaggctttcatcaattaggaagaaggaaggaaaggtacgtggcaaagatccagaggtagcaaagcacaaggcatgtgttgtgctatgagcctctttgcttatcattttattttgggaactctccctctccacatggaagggctgtcaatcacatctcttctgccatgggagaggacatgtgacccaggctggccaatgagagaactctgcctcctgggccacagtgattggttcacgggtgtgaataggaccaagccaggctaatcagagtgctctctgagactgactctggctgtgcagagaaatgctgccttgtcttttctctggcacctttatctatcaggatgttatcagcccaaagctacggagccatgtagggaagtaccactgagaatgatgttaactcagaggacaacagggcagtgggtgaaactgagtactgacaacattgcttgatctcctggatcaatccacacctgaagctagtccccagatttctgagatacatgcagccccaaagttccctctatttacttaggctacttttttttttttttggaattggagtttcactcttgttgcccaggctggagtgcaatggcccaatctcggctcaccgcaacctccgccttccaggttcaagcaattctcctgtctcagcctcccaggtagctggcattacaggcatacaccaccacgcccagctcattttgtatttttagtagagacggggtttctccacgttgaggctggtctcgaactcctgatctcaggtgatctgcccgcctcggcctcccaaagtgctgggattacaggcgtgagcctctgcaaccggccacttaggctactttaagacagatttatatcccttgcaattgagagaattttgaccaccataattagggactaatgaataagtgagtctggttagcgtttgggaggattcaaggggagaaatatgatgtgtcgtccattgtagggtagttaattactgacactgtcaaggaaaagagaaaatgaaaacgccatgccaccaaggagaacatcaacctgacaattcaggaaaggaacaaaatactgaggaattggttaacaggctggaaaataaaatatgaaccacagccggaactgccagggagctctacatgccattaccatcaacacccactccctcggcccactgcccacacgtagaagtccctccctgcatgcaaagggaaacggcgttaaacacacaccagccacaggaggtagagagcaaggatgacttgcaggggggctgaccagatcatgttaatgtacgtggccaagtccatgaacctctgagcgtccacagacatgaggttgacaatctccccgaccgtggaggattttctggctgaattggtgatcaccagggcctgtgggacaaaggagagggaaggtgggtgagtgtggcagctgaagaggcctgactctccctccagacccacggagaggaaggagactctcaggggcagaaatgccgcagatctctcctcctcccctcccgacctatctgtctgcccaggacgcctgtgtcatctcaaagcccacgttcttatccgcgctgctcagtgcctcccaaccttgaactcatcagttggcaagggaccctaggtgtcctcgaaaccagggcttcgcatgctttaatgtgcacacatgcggccgggtttttctggggggagtggtggggggtggggggagttgttttggattctgcaagtctggggtgtggcctgggattctgcatttctacgcttccaggctgtgtcagtgctactggtcccagatcccactgaaggactgagggtctgggccagggtctctaatccttggcattcttgacatctggagccagataattctttggggggctgtcctgcgcactgtaggagttttagcagcaatacctggcctcgacccactacatgccctcgcccccagttgggacaaccgaaaatgcccccagatattgccaaacgtgccctggtgggggaaaatgtccctagccctcaaacatgattgcacactatcacctcgtgagttttaaaaacactaagacattagcaggcgtggtgatgcatgcctctgggcccagctacgtggtgggctgaggtggcaggatcgtttgagcccaggaggtggaggctgcagtgagccaagatcatgccactgcactctagcctgggtgacagagcgagaccctgtctcaaaacataaaaataaataaaaaacaaaaacaatgacacctgggtgccaccacagcaatcgcaatttcactggtctggtgcaacctaggtgtcaggaagtttttttgttttttcagacagggtctcattctgtcacacaggccggaatgcagggatgctatcaggactcactgcagcctccaactccggggctgaagtgattcttttaactcaatctcctgagtagacgggactacaggtacgcaccaccatacctggctaatttttttaaattttctgcagagccagggtcttgctatattgaccaggctggtattgaacttccagcctccagtgattcccccaccttggtctcccaagctgctgggattacaggcatgagctacagtgcctggcctgcatcagtttaagctccccaggtgagtctaattcacagacaggcctgagaatcactcctctagttcatcaagtacctgcaagactgtctcttcctaacctaggagccaagcagtttccttgacctcgagacaaaaaaaaaaaaaaaatttatagggatcaagaaggtaatttaggtcctttgaaattggatgtacacaaatgcctgctacatactcttaccatgcaaggaatgtgccacctgctcagttcaaattaagactgacaacaggctgggcgcggtggctcatgcctgtaatcccagcactttgggaggctgaggcaggcggatcacctgaggtcagcagttcaagatcagcctggccaacatggcgaaaccctgtctctactaaaaatacaaaaattagccggtcgtggtggcaggcgcctgtagtccccgctactcaggaggctgaggcagaagaatcgcttgaactcaggaggcagaagttgcagtgagccaatatcatgccactgcactccagtctgggggagagagtgagacctggtctcaaaaaaacgaaaaaaaaagagtgacaacaagctgaaacacagaatgttaacagcagaatgaggatccaaacttggatttccccacaacaagggccactgatccatctaagaaactcaattactcacagctgatacacaaagacatctacacgcccacccttgaaatcagctttcctaacgtacaatgcctgatgcgtgctgtccctgccacctaaggtcacggaagctaccctcatcctactgctccagaagctgggctggaaatccccacgctggccccagagtaacccagggctgcaggaggggatgtggaagtcgggccacatgccaatggcacagcgccccctaccttccgatagacagccccaatgacagcggtcttgatcctcatgccactgacgaagcagatgtggaagtactggtgcagcacgagggtctgcaggcaggcagtgacaaacagcagcacggtgtagaagtagccctgccagtctggggccttcgtgtcgttcacgaacttgatgagcaacctgcaaaggagcaaagagagggcctggaatgacttgtgacacgtgggggcagggaagagagcttcagtgttggcactgcaactttctcctgagccagatgagctagacactatcacttcaatttcatagatggaaaaacaagtccacagtggtgatctggctgtgcaggtgacccaaactgctcataaaagaggcctctgccttggggttgtgcactaattgctctagctatatctcatcaccagcaagtcacccaaaggaattgcatagggaacacgaggtaaagaggtagggaggaaaagagaagggatgtgtagcccctgagtcacagagcagcagagagccaggtaggagagaggcaacttcctttctgactccccagttcctggttgcagttttttgttgttgtttttattcttttttttttttttttttttttttgagacaaagtcttgctctgtcgccaaggtttgagttcagtgatgcaatcagcttgctgtaacctctgcctcctgggttcaagcaatttttatgcctcagcctcctgagtagctgggattacaggcgtgcaccaccacgcccggctaatttttgtatttttagcagatggttttaccatgctggccaggctggtcttgacctcctgacctcaggtgatcttcccacctcagcctctcaaagtgctgggattataggcatgagccactgcgcccaaccctggttgcagttttttcatgagatctgctggcatttccttgctcttggtttcccaagacaatgccatatcctccccatttgggttttaggggagcctagtgggtttctgttacttgcaaacgatgtggtcttcactaatatggtaattaagtaaagcataaagtaaagctaggcagtgaccatggctcacatctgcaatcccagcactttgggaggccgaggcaggaggatcgcttgaagtcaggagctcgagaccagcctgaccaacaaagcaagaccctgtctctatttttttcaaaaaagctaaagtaaaaatggagacatctggctatgagcccacttcaggacacagcatgaccccagggttatgactgatgcaactgaaagatcaaagccaaggagggaaaatggagcccacctgggagggaaggggtcttactttaagatctgcggcccggaaaacatcatcaggtcgtggatggccttgaagaagaagctcatgaggaagtagggcccaaaggtcttgtataacaccttaaacagagaggggttccactccttctgtggggacttgacgatcaaagcctccacctcctcattcgcatccaccttggaactctctttcggctgggcaggatccttggaggagtacacgaccttcaccggctgcctggaacacaaggaggtgaagccgttgtggggtctgccagagatgcagccccctaccacagggacatggccagggaatgtcacccttcagggaaggcagagtcaaagacaacaagcccagggaaagaggcagctcagcacagtggttacaaacacgggctccagagccacgggctccagagccaccggctcaaggtctggcttggccactggccagctgcgtgacttcaggcaaggtccttaagctctctgggcctcagtttcctcctctgtgaaatgaggataaaagtaggacctacctccaaggtaggtaagattaaacgagttgaataagttaaagacttagaaaactgatggctccaaactgatctagagtcaaggcaatccccatcaaaagcccagctggctgccaggtagaaattatgagctaactttaaaattcacatggaaactcaaggatccagaacagtcaaaacaatcatgaaaaataagaatcaagttggaggattcacacttcctgatttcaaaacaatacaaaataacaatcatggccaggagtggtggttcacacctgtaatcccagcactttgggaggccaaggtggctggatcacttggggtcaggagtttgagaccagcctgaccaacatagtgaaaccccatctctactaaaaatacaaaaattagccgggcatgatggcaggtgcctgtaatcccagctacttgggaggctgaggcaggagaattacttgaacctgggaggtggaggttgctgtgagtggagatcaggccattgcactccagcctgggtgacagagcaaaactccatctcaaaaagaaagaacaacaataggctgggcgcagtggctcacgcctgtaatcccagcactatgggaggccgaggtgggcagatcacctgaggtcggcaggttcaagaccagcctgaccaaacatggagaaacctcatctctactaaaaatacaaaatcagcccggcatggtggcacatacctataatcccagctacttgggaggctgaggcaggagaatcgcttaaacccaggaggcagaggttgtggtgagctgagaccacaccgttgcactccagcctgggcaaaaagactcagtctcaaaaagaaaaaaacaaaacaaaaaaaagaacaacaatcatcaagacaggtaaagggataggcatatatacatcagtggaaaaaaaaaaaaaaaaaaaaaaaacagtccagccagccagagcaacacagcaagaccctatttctaaaaaaaaattttttttttgactgggtgcagtggttcatgcctgtaatgccagcacttcgggaggtcgaggcgggtggatcacttgaggtcaggagtttgagaacaccctgaccaacatggcaaaaccttgtctctactaaaaatataaaaaattagccaggcatggtggcggttgcctgtaatcccagctacttgggagggtgagaaaggagaatcgcttgaactcaggaggaggagggggttgcaatgagccgaggttgtgccactgcactccagcctcagcgccacagcaagactctgtcttaaaaagcaaataaataaaattgactgtgatgatgactgcacaactctgtgaacacactaaaaatcagtgaattgtatgttctgcatacatgaattgtgcggtgtatgaatatctcaataaagctgtcaccaaaaaagtagtctttatcttatagggattttttttttctttttgagatggagtcttgctctatcacacaggctggagtgcaatggtgcgatcctgactccctgcaacctccgcctcctgcgttcaagcgattctcctgcctcagcctcccgagtagctgggattacaggtgtgcgctaccacacccagctaatttttatgtttttagtagagacagggtttcaccatgttagccaggctggtcttgaactcctgacctcaagtgatctgcctgccttgggcccccaaagtgctgagattatgggcatgagccactgtgcccggccaatagttcgttcttgtacatcacttagtattcagttgtgcagatgtacgtaactggtgcatctgtctgttcacttgctaatagatgtctggcttacctccagtttgggttatcacaaagtagctaagaacgttcctgtaccagccttttatgaacatatgttctcagctctgttggctggatgcctgggaagggggtgactggtggtatgttcactgtgtctaacttaaaaaaaaaaaaaaaaaactgccaaactcttccagagtcacagaagcatttcacattcatgccagcagaaaccacagtccaaaatggccctaagctctgagtggccatacacaaaagagaacataaaaccactacacacaaaccaatgaagcactgggtttttaaatccaaacaattcaagcaattctcatgcttcagcccccctgtagctggattacaggtgagcgccaccacacccggctaatttttgtatttttagcagagacagggattcaccatgttggccaggctggtctcgaactcatgaactcaggtgagcctcccgcctcagcctcccaacgtactgcaattacaggcatgagccaccatgcccagccacacctgacttttgagaaggagtcactcaggggtgaagagaggtggtaaaaggatccaggaagccatgcagagcccccagccctggcgtccatcacctgatccccgagcctaggatacccagcagcccagagctgcacgagctgcattcctttctctggttaacaaaagggatctgagtgtaaggggccacaccaggaaattccagcctaggacagggttttccttctcactctctccaggttcacaggggttacaggtgccagatctggcttatgcctctgggaataaagcaagcgatccgtctaccaatgtcccaagtaaatgatcccctggctccacgctgaggatctctaaacaccaaggtactcacagagccagacccttctcaggtggcccgctttcaagccccaagacccagttctcaccacatcctccctggcaagatcaaagtgtacagatgaataaataaaacttgtacaattaaaacctgcccagcatgtactcagggctagggcacagcttatcatatcatatatctcactgaattctcagaaaatgctctgggtgaaaaatggaggctccagtcaggcacagtggctcacgcctgtaataccagcactttgggaggccaaggtaggtggactgcttgagctcaggagcttgagaacagcctgggcaacatggcgagatatcatctctacaaaaaaaaaaaaaaaaaattagccaggtgtggtggcacgtgcctgtagtcccagctactagggaagctgaggtgggaggatcactccagcctaggagatggaggttgcagtgagccgagatcgtgccactgcactccagcctggacaaaagagtgacaccctgtctcaaaaaataaataaataaatacaatggcggctcccggtgaggcatgaagggacttcatggacagcccttgaggttcccaccctggtctccctgccttcactcttgtccctaaatatccaccttccccaggacagcctgggttgttatgaaccagaactcagctgggtgtggtggctcacacctgtaatcccagctatttgggaggctgaggcaggaggactgcttgaagccaagacttggagaccagcctgggcaacacagtgagacctgtctctatacatatgtaactaacctgcacattgtgcacatgtaccctaaaacttaaagtataataataataaaataaaataaatttaaaaaggccaggcgcagtggctcacacctgtaatcccagcactttgggaggccgaggcaggcagatcacctgatgtcaggagtttgacactagactgaccaacatggagaaaccccatctctactaaaaatacacaattagccgggcatggtggtacattcctgtaatcccagctactccggaggctgaggcaggaaaatcgcttgaacccggggggtggaggttgcagtgagccaagacagcaccactgcactccagcctaagcaacaagagcaaaattccatctcaaaaaaacaaatataaaatataaaattaattaattaattcatcagccaggcatggtggtgtgcacctgtaatcccagctactctgggaggatgaggtgggaggactgcttgagcccggaatttccaggctgcaatgagctgttatcatgccactgccatccagcctgggcaacagagcaagaccctgtctctaaaatacatacatacatacatacatacatacatacatacatacatacatacatacaaacaaacaaacaacagaactcacgtcacaccactgccctgcagaaaacctgcgcctgtgttctcactgcacctggaatcccaccttaactctcagaggagacccctgcaaatccttctcctgcttcatctcctccctttctccccctcactcactttcctcaagccacacgagccccctgatgcaccacgagtgtcctcagagcctttgcactggctgctccctctacctggaaagcccttccttccccagatacacacaaggctcactccctccaatgcaagtctctgctcaaatgtgaccttctcaaaacaatcatacatggtcagctgggcatgttgaacaaaaacacttcaaaaagcagtaacactcaggatgccagaggctcgaaaacagccagagatagacttagggagggacaggcacatgctcaccaagggtcatggccacactgggtagaacctttgaccactgtatctaaaacacctctctcagccggacacagtagctcatgcctgtaatcccagcactttgggaggccaaggcaggaggatcacttgagattagaagtttaagaccagcctggccaacatggtgaaaccccgtctctactaaaaatacaaaaaattagtcaggcgtggtggcatgcacctgtaatcccagcactttgggagaccggggcagaagaattgcttgaacccgagaggcagaggttgcagtgagccgagatcacactactgtattccaccctgggtaacagaatgagactccattcttcaaaaaaaaaaaaaaagaaaaagaaaacacacacacacacacacacacacattacacacacacacacacacacacacacacaaaagcttcctcggttactctcaccctcatttcctcatttttatctcaccccaacaccatcattctccaaagcttcttgtcaatgcatgtttcacaaccaacgtcctgtctcccatatagaatgtcgatggcacccaactagagtgtgtctcttttgttccactctctgaaccctcagggactaaacatcgctaagcacaaaagcagcagtcagtttcatctgctcagtggattaagagccaggccagtggaggagcttctggattcaaactctgtcctcctcccaaggctgtgatattggcctctcccatggtgtctccagcaacctgctctcctgacaagctccaggggacacaaaggtgggcatccgtcttccatgagaggaagccgagccaggtgatcagcagaggcgtggatgatgaggaatgctgaagcccacactacaaatgtggcctgcttagcgggggggatgctgcaggtgaggctgaaggaatccagatgagatgggtgatgttaggggtcaagttgactgggttaagggatacccagattgctgttaaagtgttatttctgggtgtgtctgtgaggatgtttccagacgagactggcatttgaatgagtggactgactaaggaagatccatcctcgccccatgtgggtggcaccgcccaatcagcagagggtccggacacaacaaaaagtcagagtaatggcaaatgcaggcactctctcttccgcagccaggatgtcatcctctcccacccttgaacatcagaactccaggatttctggcctctgggacttacccaatgactccaggttctcaggcctttgactatggactgagaattccaccatcagcttccctgggtctgagacttttggactaggcctgagccatgctaccagcttcctgggttctccaggttgcagatgacctagggtgggacttctcagcctccataatcacatgatccagtttccctagtagatcccctctcatcctccatccatccatccatccatcatctatcaatcatccatctatctatcatctatccatctacctaccatgtatacatccaccaactatccgtctatcatctacctatcatctatcaatctatcatccatctatctatcatctatccatccatccatccatccatccatccatcctactagttctgtctccatgaagaactgtaataaacagggaccccacctttgcctgccaaaaaccttcaactgggtcatggacatgggccatttccttacaatgctcagtcacagaggcccaagctctatctgcctcccacgagacaatttctcccatcacctggaccacccaaacagcctccgaccggagtcacgaggtcctctgctgatgtcctagtggctggcacatggatgtccagattcccacccaccatctgggtctgactgaaggcctgtatcctgggcatccccggaatagaatgaggaacagaaccccggtctggggtttttccctgtaaggccaatgggtctgtggggaatccaatgcaccacactggccccaccacagtttatcgtagtaaacttaccccagaacaggcaacaggaacaaaaacagccattctactacccccatggccgcaatccactgcccccatgtcacccacaatttcatgttccagttcgtccgggctcgagacaagtcttatgtccttgtttaattggcagctgcttttcttactgttacatagaataataacgcatcacgcaactaatggtgtctcagatttgatgagttaaggtatgtgcaggggaggcactggcctgattcccgaagagtgacagaggtggtgcagtggggcacgccttacatagggggtagagcctaaaatccagtacagccaaaatcaccctcaaatggggcttctttggctaaacagacttacgtggtcagctgggcatgttggacagaacattcaaacagcaagaacatgcaggatgccagatgctcagaaagagacagaaaaaagtgagactgactcaaggagggatagtcacgcgccatggcagacagcatcaactgcctgtttggacaacatttttcttctttttttttttttgagacggagtctcactctgtctcccaggctagtatgcagtggcacaatctcagctcactgcaacctccgcctcctgggttcaagtgattctcctgtcagcctcctgagtagctatgattacaggcgcctgccaccatgcctagctaatttttgtatttttagtagagacagggtttcaccatgttggccaggctggtctcaaactcccgaccaagtgatccgcctgccttggcctcccaaagtgctgggattagacacgagagccaccgcacccagcttctttcttcttttctctgcccagttgctttaatgacatgtgagatcctaccccatttggcagaaaagcaaactgaggccaggaggagaagtgaggcatcttgcccagaaccacaaagctagtaacaggcagcactgccagggccccatcctggattcaggccacaggagtggaaaggaggtgaccagggcatcctggaggacaaggaaactcacacttacttcctagtcttggcgcattccttcttccagttctttaccaaaacaggcacgacttgttccgacgtgtcctccttgtttaaggaccagaggtcactgccctccaggggctggcggtagccccggacaatcaacctggggccaagacacaagggggttaggcaatgagagtcaatgacaggaggagggggaggacggggctcactcactccacacgcctgctgatgctgctcccctctgcagcacagctgcccgctgcaaatgaaggcagccatgcagcttgggaagtcagaatgcagatggacatttgcatatattacaagctaattacagctcattctgttgggtcatgcaggaaaaatggctttttttttttttagtggtgcatacaaaagacttagggaaaaaaagatgatttaggagcgaagtatcaggatagctcttttttattttttattattcgttcattcatttatttacttggagagagggtctcgctgtgtcacccaggatggagtacagtggtgcgatcgcagctccctgcagcctccagctcccggtctagagtggttctcccatctcaacctcccgagtagctgggactttgggtgtaagccattatgactggctaattttttttttattttttatttttgtagagacaagagtctccctatgttgcccaagctggtcttgaacccccgggctcaagcaaccctcccaccttggcctcccgaagtcttggaattataggcataagccaccgtgccccgccaactttttaaaattttaaattaaaaaaggctgatatgggccaggcacggtagctcatgtctataatcctagcgctctgggaggccgaggtgggaggattttgtgagcccctggagttcaagaccagcctggacaacatagggagactatctctacgaaaagtaaaaataaaaaaattagccagtcatgatggctcgcacctgtagtcccagctactcgggaggctgaggtggcaggattgctcaaggccaggaggtggaggctgcaaagagccgtcattgtgtcactgcactccagcctgggcaacagagtcagaccctataaaaagaaaaaaaaaaaataggctgaaggaaaaaattaaaaaataaaaaggctgacatgacaaagcattagtaagcatgaaatctgggtgatgagattattgagttttattatattcatctttctatgtcactccatccaggctggagtgtaattggcgccatctcagtgcactgcaacctctgcctcctgtattctagcaattctcctgcctcaccctcccaagtagcctgggattacaggcgtgtgctgcccggctaatttttgtattgttagtggagacagggtttcaccatgtaggccaggctggtctcgaactcctgacctcaggtgatccacccaccttggcctctgaaagtgctaacattacaggcatgagccaccgtgcccagcagactaaacacttttataataaaaggtaaaatactttcatgttttgttctaaaataatttcaaacttatagaaaaattactcaaatcatactaagaattcactcaactcaccattgttaacacgttgccacgtttgcagtatcattctctgtctgtatccattgacatgcacacacaaacacacacacacatgcaaacacatcatctttttctgaaccacttaaacagttaaaggcctggcatggtggctcacacctgtaatctcagcaccttgggaggctgacgtgggtggatcacctgaagtcaggagtttgagaccagcctggacaacacagtgaaactccatctctactaaaaatacaaaaattagctggatgtggtggcaggtccctgtaatcccagctactcaggaggctgagacaggagaatctcttgaacccaggaagcagaggttgcagagagctgaggtcctgccactgcactgcaccctggacgacagagcaagactccatctcaaaaaaaaaaaaaaaaaaaaaaaaagttaacatacagcctctacatgcctttacccaagaaaaactggaggtattctcttccaatccaggacatgctcttatgtaactagagcacaattttccaaaacaagaatgaatgttattagcatgcatccggggtcctgtagtcatgaacaaattacatcaactgtcccagtgatgctttttaatagtaacttgaagaaattatttaaaacatctaattttttaaaacgatgtttgtcattaagacaaggatgagaccgggcatggtggttcacgcctgtaatcccagcactctggaggctgaggcgggagaatcacttgagctcagaagctggagaccagcctgggcaacatgatgaaaccccatctctacagaaagtacaaaaatctgctgggcgtgggggagtgtgcctgtagccccagctactcaggaggctgaggcaggagcatcacctaagcccagtagattgggactgcagtgagctacaagtgtgccgctgcactccagcctcagcgacagagagaaagcctgtctcaaaaaaaaaaaaaaaaaaaaaaaaagatgatgcttattaggggcaaaaaaagattcttcaaacaatccccactaagatgttaacaacgggcagaaaaagatatacaaaaagaggaccagaaggtagctgggcatggtggctcacacctgtaatcccagcactttgggaagtcgatgcgggtggatcacctgaggtcaggagtttcaagacaagcctggccaacatggcaaaactctgtctctactaaaaatacaaaaagtagccgggcatggtggcgcaagcctgtaatcccagctacctgggaggctgaggcaggagaatcgcttgaacctgggaggcggagacttgtagtgagctgagactgacagagtaagactccgtctcaaaaaaaaaagaaagacgaccagaagaaggcatactaaaatggtgacactggttacctctagatgtctcctgcactgctgatctgcacatgtggttttttaacccacacttcctgtggtgagacagtattatttttctaaggcgtgggggacaggagggggacaatgtcaataataactatacctaatattttaaaaacccaaatctgaagctaaagcaaaagcagtccagcatatggctgtcccaggcaaagccttctgcagaggtgtcagctgctcacggctcacgtgtttatcacattcaagttcacggaactgccggacagagttggtgtctctgagaccacatggccagcacaggcagattcaagacaactctgcagaagagcaaaggagggagaagttggggagggggagctgagcatgttcattcgttcattcattcattcattcactccccaccacctccctgaggtctggggggcctggccttaccctgtgatccaccagaaggtgatcctcgacaggaaggaagcgctggactctgggcagggattctagtggaaagaaagcacaggtttgggaggaagagggaaaggaatgatttgacttttcatccaggtcagagcttagcaagtagtcagctgctcactcttccttccagaggactagcgtcagctccacaccattctgcaccccaaaaggaccctctcctaatagccaggagaaagaaattcatggcagctcttccagtttcaatcaacggagtgtctaccatgtgcaaccacaatacaacatgctatagacctgccttgtcttctatccccacaacaaccctaggagttggtgttaacgtcatccctacttcactcattcattcaacaaatattttctgagcacctactatgtgctaggcattctacaaggtactacagggttgccttatatccccacgacaacctcatgagcgggtattactattgtccccactttactcattcagtcactgaatatttattgaccatctactatgtgctagacactctaccaagagcttatatacttgcattattttatatcctcatggaattctataaacatggtattactattatctccacttcattcattcgttcatccaacaagtatttcctgagcacaacccttgtgccaagcaccctgcatacaaatctaaacaaacagaaatgacccctgcctgtatggagcttgtggtctactgcagtaatcatcagtaatacctgccaagattctctactattagtagctagctcttttctaagtgctttacacaaactaccttatttaatcttcatcctcacctcacaagataaataaaagtattatatcatccctgttttgcagttaaaagaaactgggcctgtaatcccagcactttcggagaccgaggcaggcagatcatgaggtcaagagatcgagaccatcctagccaacatggtgaaaccctgtctctcctaaaaatacaaaaattagctggatgtggtggcaggcgcctgtagttccagctacttgggaggctgaggcaagagaatcgcttgaacccaggaggcggaggttgcagtgagccatgatcgaacgactgcactacagcctggcaacagagcaagagtgtctcaaaataaaaataaaataaaatttaatttaacttaaaaactggggaccagagatgaaaagatttgttcaaggtcccacagctaaaagcggtggagtgaggatgtgagccccaaagagtcaggctccagagagagacatgcatcaaatgatcacatgaacaaatgcaaaactacaacttctgggccttgatgtgtgtcctgaagggagagaaatattaccaatgagacaaagtaagtgcatgggggctgatctggtgtacgaaggtcagagaaggcgcccccgaggcagacagtcaagctggcacctgaagggtgagtagatgagaactaagtaacaaggaaaggcaacgcattcccaacagacagcagtgtgtgcaaaggcccggtggtagaagaaagcatggtagactccaggaaccaagaaggggcctgagtagtctacactggaggctgtgcacagtctacactgcaggccacatattttggtcttcattctaagggcaatgggaagtactgagagattctaagcaagctatcaaagaactcatttcccagagaaatgaagatgagccccaagtcaacaacatgcaggcaaggaaagggaccgatacagagctcctgggatgacagacaaagcctggctttcaacatggatgcatccgggtctaaattctgaaacacaagctttagcagcagagggaagagaggtcaccaggcagtaatgaaagctttagccaaggactccactcaaagttccagccttgtgcagatataaggcatttacagagcccgataaggtggcatactctcgtccagtggttttccattcaaggctgggcgtgctttttaaaaaatactgtatcctggctgggtgtggtggctcatgcctgtaatcccagtactttgggaggccaaggcgggcagatcacttgtggtcaggagttcgagaccagcctaggcaacatgatgaaacctcgtctctaccaaaaatacaaaaaattagctggatgtggtggtgggtgcctgcaagctcagctactcgggaggctgaggcagaattgcttgaatccatgaggcggaggttgcagtaagctgagatcgtgccactacactccagcctagggaccctgtctcaaacaaaataaaaataaaatttaaaaaaatactgtatccgggccctacccgcaccaggcaatctgattaagctggttctgggtgcgactggggcactgaagctttgtttttgttttaaacttccagatttttcttggaaaagtggctgggcaggaaatatgcaaggtaagccaagaacatcttgtcacaccggacaacaaggaaactaagcatgaacaggattgttaaaaggctcaagagccaagcagaagtggccgctgcaggctaaaagagggacaatttgagctttgacaaggagaataagtacaacaggctgaaacataccaagcaaggtttttgttttgttttgttttttgagatggagtctcgctctgtcgcccaggctggagtccagtggcgtgatcttggctcactgcaaactccgcctcctgggttcaagtgatcctcccgcctcggcctcctaagtagctgggattacaagcatcagccaccacactgggctaatgtttgtatctttagtagagatggggtttcaccatgttggtgaacaggctggtctcgaactcctgactcaagtgatctgcccaccgtggcttcccaaagtggtgggattacaggcttgagccactgcgcccagccttacatgtttatgtacacaaatttcatattgacgctggaaataaagagaaacatctgatgttgtcagtgaaccaggtcattgtttgaacgcagaaaaagcggaaagaaacaagtattttctccacctttcccaaatgtactcatttggttcaccagggttggagaaggcttccctgaggaaaacagtcatttattcgatcaccacagagtgatcagtgatcaaagaaatgaaggggaaactcttttccataaaaaaatcccagctaaaacataaagaatgatatcatagaagaatgagccattgtacaaacacaatggattactggaatatttgataataatgaattattattaaagttagtattacagtcacatatacatgttttttgtcaagacaaggtctacctatattgatcaggctggtctcaaactcctgggcttaagtgatcctcctgcctcagcttcccaaagtgctggaattacaggcatgagccatcacatgcagcccaacagttacagtttttaaaattcttatctttcagatgttatcattagagaaagttgagcaatgaacatcaggaactctgttatttttgcaactttttgtgagccaaactattgcgaaataaaaagtcatttaaaataaacaaatccatgtccttcagagatacatattaaaacgttcacctatgcaatgcatggtaaagagctcatggcagctgggcgcagtggctcacacttgtaaccccaacactttgggaggctgaggcgggagaactgctttgagttcaggagttcgagaccagtctgggcaacatggcaagaccctgtctctacaaaaaatataaaaattggccggacatggtggcacgtgcctgtagtcccagctactcaagaggctgaggcacgagaatggcttgaacccgggaggcagaggttgcagcaagctgagattgtgccatcgcactccagcctgggtaatagtgagaccctgtctcaaaaataaataaaaagaaaagaaaaagagctcatggtagttcattatcctaggctgtctactttatgtttccatcataaaaggctaaataaaaagctcctccagtgattcaaatacacagccagggctaaggatcaggctccgctctggggctcggaggggtgatgaagttcccagccctgcctgtccactggaatcacctaaggagtttgttaagtgccaagtgcctagggccccaacccagaccaactaaatcagcacctccagggggaggaccctgacagccacagatctttaataagatcatcagatgcagccggtgcattccagaccaactgaagccgagttcagatcagaccgtggacccggacagacctgggttctaatcccagccctgctatattctagctgatgaccttgggcaagtcccttcacctccaagcctcagtttttacacctggaaaatgggagtcgtttgtcctactgcttgctcgacctatcccccgggactgccaggagggacaaatgacatgaggcccatgggactgtgtcgtaaagcggaatttctccaacctaaggcgtggaggtagtggtgtttgctttgtaggctgggtagaaacactgcattgcaggctggtttttcatccggaagagctgacaccttcctgcccactcccacagtcggcgggtgggttatcagggaattgcaaatccatttcacctgcagcccaagccctctacccactgtgaaagaccaaggtgctggctggcagagagaggaggaaggggtggggcatggctgtcaatgattcatttatttattggtcaaatatatgggcaggacttgcttataggccaggatgtgggtgaagtgccgcggacggagctgcaaacgagacagcgagacccctgccccattcagcctcctgccctggggaagatggacagtaagtaaaccacggtgcaaacaaatatataattacaatcagaattacaatcagtgagagctgcaacaaaggaaaaaggtcagtcatttgaggcccgatatcaccccttaatcactgagggttgaggtaggcagaggttaaccaaccgtttctggaaacggccagctgataacaaaggaacaaaggaaaaggaaggcggcaggggtggaggggcagcttctgtgtgaagcagtgcatagcacggggctagctggcacggctcaatcccagcttgccatttcctagctgtgggaccttgggtcagttccttggtggtgaagattaaatgagatcaaacatggtaagtacttagaatagtacctggcacaaagtaacagccaaagaaagggtaacatgagtagtagtagtagtaataataatagaagcagtgacagtagcctctggtatatggaaacataaaactgtacaccttaaatatattttcgagacagggtctcgctctgtcacccaggctggagcacggtagtgtaatcatagctctttgcagcctcgacctcccaggttcaagtgatcctcccacctcagccccccaggtagctgggactacagacgcacaccacaacacccagctaatttttgtattttttgtagagacagaatttcactctattccttgagctagtctcgaactcctgagctcaagtgatccacctgcctcggcctcccaaagtcctgggattataggcatgaaccaccgtgcccaacctatataccatttttatttgtcaatatacatcaataaagctcaagtgtttgggggggaaaaaaccccagtgggttcacaatacaccactataccagatgctttatatatcagaagcatctatggcccacagaccagctatttataaataaagtttcattggaacagtcacacccattcatttatgtattataaatgagtatggcagcttttgagctacacagcggagttaggggttgccacagacagtgtatgggatgcaaagcctcaagtatttatcagccagccctttccagaaaaggttggctaacctctgcctacctcaacccccacaacataccaagacacagtgattaaggggtgaaaacaggcctcaaatgacagtcttttgcctgcaaatccagtcttcttcagccttggcatcaacacgcaggatagagacagccaggggaggcttgaaatgcagcccatatccagcttaacaagaccctcaaatcctaaccttccctcggcccagtaaaactaagtccccagccactggtagaaaacctgccctgcaaatgcaacaaggacattgacagacagaacactgcacagttttttgttttttgtgttttgagactgagtctcactctgtcgcccaggctggagtgcagtggcccgatctcggctcactgcaacctccacctcccaggttcaagcaattctcctgcctcagcctcctgagtagctgggattataggcatctgccaccacacctggctaatttttggattttttgatagagatggggtttcaccatgttggctaggctggtctcgaactcctgacctcaactgatccgcctatctcggcctcacaaagcgctgggattacaggcatgacccaccgcgcccagcaattgccatttctaatttgcacactcaaagagctttgtcaaattcttctcctcaggccgcctctcttctatggatctaaacacagattttcagattatctcaagtgaccgatagggaggccaacacagggtccccccttcactggcaaaaaaaaaaaaaaaaaaaaaaaggaaatagccttttttttttttttttttttttgagacggtttcactctcatcgcccaggctgcagcgcaatggtgcgttctcagctcactgcagcctccgcttcccaaattgaaacagttctcctgcctcatcctgccacatagcggggattacatggtgcacaccaccatgcctggctaatttttgcatttgtagtacagacgggggttttatcatgttggccaggctggtctcaaactcctgacctcaagcgatccacccacctcggcctcccaaagtgctgggattacaggcatgagccactgcacccggcctggaaacagcctctatctgacgtggaaggccttacttgacaacaaagacaactaacttctgaagtaggtcaaggattgacaataaaaaaggaggaaaaaaaatcatggggcactggattgtaatccagggagcatgtcatttaacccaaaccaaggagaatcttttgacatcacacactaggtacaaaagacagagccacctccagggggtttcccagcctcagacactgaaatacagtaactcctgtcccagatagcatgaaagcagcttgtgaactggtccctctttcatttgaaatgaaaacaattcagagaagtcctggctgaaggcagagggaggaaaagcctgattcatccaaacagagtgatgtgttctttggcatccaccatattgacatctacgtttggtaccagatgagctggccagaaaccctgtggtttgaaccaattaggtacggcagccccaggcactgattcttggagcgcagggtagtttaaggaccttgtctgggtctttcagcatgttgacctgtttgtcagaaacactctcagcttttagttctaacgggttttctgctggttacctccgctctgcactgccaaagtgccccccacaacccctgcacccagcaggaggcaatgcgtgcagcagcaataatgtttagagcagtgatcctcaaacgcagctctgtcaccagcatcggtggcacctgggaacttgttgggaaccgcagatgctcgggccccacccagacctactgcatcagaaactgtgtgggtggggaccagcaatctgtgtttcaagcgtgagaacccagtgggagggttcctgacacatcaccactctgaccctcagtgtcttcatctgtcaagtggggagactgatcatcctgccctactgtgaggactaaataaataatacagtgcacccagctgttatccttattattagacggagcctaaatgtccagcagtaagagatctgccagtataacgtaaacactggtgatttgtttgccctgttgcttaccaactgtgcaaaatgcctccctgcccaggacctccgtttcctctactggagcacaccccagaatctttgcccatgccctttgcccatcaacttgtctgttttctttgtttttttgtttcaagagatggggtctcactatgttgaccagattggtctcaagaaatcttcccccctaagcctcccaaaatgccaagactacaggtgtgagccacgcacctggccctttttctggtttttgatgctgtagtgggcacaggggaatatcctggctcagcctccctctctacctgcctgggtgcctgcaaaggctttttaagtgccaccgacctcacccccatgtccaatgtatcctcttcctttgagcctgaggatcttccacaacctgtccaacctgagtgtgtcattccactggtgaaaaacctttcctcagctcccaccacagtagggttaaaattccaagtcctggctggatgtggtggttcacccatccctgtaatcctagcattttgggaggccaaggcagggcatcacttgagctcaggagttcaagaccagcctgagtaacatacagaaaccccatctctaccaaaaacagaaaaagttacttgggcgtggtggcacgcaactatggtcccagctacttgcgaggctgaggtgggaggatcgcttgagccccggaggtgggagggcacggtgagctgagatggcaccaccgcactccaaccttggtgacagagtgaaactccatctcaaaacaaacaaacaaacaaaaaattccaagtccttattgtgacacataattgcacccttgatctctgatgctccctgactcttgcctctcttttcgcttacatcctagcccttccaatctagccaagcagaattctttttgtctttctttcttttgagacagagtcttgctctgtcgcccagactggagtacagtggcgcgatctcggcgcactgcaacctccgcctcccgggttcaagcaattctcctgctgagcctcccgagtagctgggattacaggcatgcaccaccacacccagctaatttttttatgatcagtagagacggggttttaccacgttggccaggctggtcttgagctcctagtctcaggtgatctgcctgcctcggcctcccaaagtgctgggattacaggcatgagccactgcacccagcctagccaagccgaattccaagtgattcccaacacccacaagctccctcaactggacctttgcacatgccagttgctctaccaggagcaccctcccaccccaccacctccaaccatattcacctggccagagcctcgcattccttagacttgagcatcccctctcctccctggatgctagccctggagccccaggctgagtcagggaccactctcccagcccccacaactcccagcacttccctccctcagagcccccactgtccatcctgcagttgttggttcaactgcctgccacccaccttccatctctcctccagggcagtggtcaaggtctgtttctttctagctcagcccctggcacaacacctgattattaaatgactgaaagcatgacggagaaatggaaagaaaatggagtttcaacgctttaatcaacggtccaagatcaggccttggtgggtggggacagagactgatcatgaaggggcacgagggaacttcctggcgtccttgcagtgttctgtatcttgacaggggtttaaagtattcctttaccaagattcatcaaatgctaacttgagatcagcaatttcactgtatgtaaattttaagcaaaaaactcagaagtgtaaacagatcttaaactctagctaatgatttacttggaagtgggtgcatgaaagaatactaatatatttcgaaggaagtttcagatatcaaaaaaactaggttcagtggctcaggcctgtaatcccagtattttgggaggctgaggtgggaggatggcttgaggccaggagttcaagaccagactgggcaacataaggagccctcacgcctacaaaaaatttaaaaattagccaaacacagtagtgtgcacctgtagggcccaagctacctgggaggcagaagcgggaagatcattggagcccaggagttggaggctgcagtgagctatgatcacaccactgcactctagtctgcgagacagagtgagaccctatctcaaaaacaaaaaacaaaacaaaagtagccggttggctggctgattagctatctggttagacagacagatatgtgacaaagcaagtttagcaaaatgttaactgtggctctaggtaccaactatatgactgctcacagtagaattctttcgacttttctgtaggtttaagaatgttcatagtaaaatgctggggggaaaatattacatattatacagacaggactaaaaatacctcttactgcaaacgagctgagtagctttcactgaatgttccaaaccagtgatttgcaaccctgaaccacctggagatcttgttaaaatgagtttgacttggtaggtctgggatgaggcctgagacccagcatttctagcaagcttccgggggatgtcgagcattccaactggtccaaggacctctgctttcagctgggacctaataaatgatctcctttggccttgatccccttatctacaagaccctcctcccccaaacctaaaccacagactcagtgccaatgagaaaaaaggcaggagactggggaccggccggagctctggcagtcttggtcagccctgcccaggctcccaaaagcctcggcagccccagagccagaaggacagatgggaggagccccaccaagcagccagggctggaatagacatctgagtcatggagtgggagcagggccagct

SEQ ID NO: 665 - DNA, 68355 bp, Homo sapiens
aagctttatgcctgggagctggcattcaaggacaaggtgctggccatcaggcaggaggagctgaaggtgctgaagaagtctgcctacctgtcagccgtgggcaccttcacctgggtctgcacgccctttctggtgagtgaagccacatttttcctggccctcattgtttgatgttttattttctctgcgtacctgaatatttttaaaaggtcactatgttgcccaggtgcagtggctcatgcttggtaatcccagcactctgggaggccaaagcaggtggatcacctgaggtcaggagttcaagaccagcctggccaacatggtgaaacccagtctctactaaaaatacaaaaaaataagccgggtgtggtggcgcatgcctgtagtcccagctactagggaggctgaggcaagagaattacttcaacctgggaggcgacggttggagtgggccaagatcacgccagtgcactccagcctgggcgacagagcaagaccttgtctcaaaaacaaacaaaaaagtcactatgtcagcaaggccttccctgaacacttggtttaaacatttgccatcttctccattctcctttgttttattcacacttagcagcttctagccaacctgtgtaggaaccgttcgttatctatttactgtgatataaggagcttgtgccagaatgtaaaccagtgccccctgcttcctgcattaagatagccttgcaagacaaaaagtgcgagctgagtcgaacggcacgcttggtgccatagttgatctacattgtggtgctgcgtccttattttgtcaccaactggtcacaaagtgtggattgtcagtgtctcataggccacatgtcaagtggcatggtctaaacacactctaaaatttacttattttgggctgggtgcggtggcttgtgcctgtaatcccagccctttgggagtccaaggtgggtagatcacttgaggccaggagctcgagaccagcctggccaacctggtgaaaccctgttactgcttaaaaaaaaaaaaaaaaaagaaagaaaaaaaaagctgggcatggtggtgcatgcctatattcccagctactcaggaggccgagacatgagaatcccttgaacctgggaggctgaggttgcagtgagccgagatcgagccacggcactccagcctgggcaacacagcaagaccctgtctcaaaaaagtaaaaaaaaaaaaaaataagtaaaataaaatgtacttattttattgtctgcttttcccccactaggatgtcagctccagatgggcatttttgtcgtttctcttgactgctgtatcctcagtatataaaacagtgcatagcaggtgctgaacaaatattgtcatccattgtaaaaaaaaaaaaatacagaaagatataaaatgaaaagtatattgtcctctcttccatcagttcctcccttctaaagtgacagtttcgtgtacgcttttagagaaaaatggacaagcatataggtatttaaaaatactttgacagatataaatggaatcatactgtacatagtgttctcttttctttggttaacaatatatagtcttggttcgttcattctggtctacttcattttagttttttggggggttttgttttgaaatggggtctcgctctgtcccccaggctggagtactgtggtgcgatcatagctcactgcagccttgaactcctgggcccaagcaatcctcctgctttagtttcctaagtagctgggactccaggtgcactgctaccactcccagcttgtttcatttgtgttcatgatggatgcttgtctgacgtgcagatgcgccctgctggaattaccctttctcccattccttgcaaaaacaggttgttccctgttttttttgctgttatgatccatgctacactgaaagttctggtacctgtcctggggtatggtaatgggtctatccctgcctagctggctttgaaaagtttaaagacaacagtgcaacttacaatttgcaaagttggccgcaaatcaggagaccatacagagatggactttggaaattccctttttaagcacagttaaaaacagttaatggtgaaggatgacttcagatcatgccccatgtttgttttttctttctgtctttttattaactgtgtcattctttttgtaatgttgtgctcattacaactattccttcttggtcaggttggcaaattatatgtttttctggcaagtttctgtgaagcagagttaaacatgtttatgaatatgaacttttctgttaaactaccatctgcttcatctttgttgagtttcaggtggaatgtctaaggaagctccagctgtttcagcatttgcgaaagcgtgttcatgctcccactgaattttcttagtcttgccttacttctctcagggtctggaactgcaggagagatggtgttcaaattcaagcctgcatcagaatcacctggagagcttgttattatattttattatttattcatttattgagatgaagtcccagtctgtcacccaggttggattgctatggcactatcttggctcactgcaatctctgcctcccgggttcaagcgattcttccacctcagcctctgagtagctgggattacaggcatgcagcaaccatgctcagctaatttttaaaatatctttagtgtagagatggtgtttcaccatgttggccaggctggtctcgaactcctgacctcaggagatctacccgccttggcctccgaaagtgctgggattacaggcatgagccacagtgctggctgttagcttgttactataaaactcagctttctgggccccacccaaattttcagttttagtaggtctggttggggcctgagtatttgctttcctaacatatccctaggtgctgctgcttctggttcaggttgacatgtagagacaccggagtggatcctcactgcctaaagtctggtccgtggaccagcagccatggcatcacctggtgcttgttaacggtgcagaatttcaggcctcagcccagatccactgaaacggaatctgagttgtaactagttctctaggtggtgtgtatgcacattaaatttcgagagagactggcagaaagtaggagtaaagaaactttttctgtaaatactttcggaattccgggccatacagtctctgtcacaaataccagtctcttccagcgtagtgcaaaaacagccttagataatatggaaatcgatgggtgtggctgtgttcctgtaaaaaagtatttagagacaccaaaatttgaattttatagaatttgcatgtgtcatgtaatattgttttgatttttttaacttttaaaaaatatgaaatctggctgggcgcaggggctcatgcctgtaatctcagcactttgggaggccgaggcgggcgggttgcttgaggctagcagattgagaccagcctagccaacgtggtgaaaccccgtctatactaaaaatacaaaaattagctggaagtggtggtgcgcacctgtggtcatagctactcgggaggctgaggcaggaggatcgcttcaacccaggaggcagaagttgcagtgagccaagatcatgccacacactcctggctgggcaacagagtgagaccctttcctgctgctgcccccccaccccctcccagccccccacaaaaaaaaattagccaggtgtggtggagcatgctggtcatccaagctttttgggaggctgaggtacgggaatcgtttgaacccgggaggcggagatcgcagcgagctgaggtcacgccactgcactctaagcctgggcaacagaacaagactctgtctcaaaaaaaataaaaaaaatgaaatcaatgctgagctcatgggccgtatgtaaacaggtgtgggccaaatgtggacctgagccatccttgttggccagcccctggcttagaggactggaatgttcttctgagaatcaggacacctgccacattctactgccagctcacagtgtgaccccaaagctggtcatctcacctcgctggctctagattttgtcacatggaaaatgaaggggttagattccaagcatgtcaaatactgggccctgtcctccttcctcatgcccacagcagacacccacagtcactcatggggttctttcccactgagttatgttcaagcagccctccaggtgactggtgccagtggcctagagttgagcaagaaatgacatcttgttgcccttctgtaactccatgttccctaagatcacttccagctccaatgcccctgcattctgccttgtacattgcattcttcttacactccaataccttgactttaccggggtgcgttgatgaactctctctttttttgttttttttgggactgagtctcactctgtcacccaggctgaagtgcagtggtgccatctcagctcactgcaacctccatctcccagttcaagcaattctcctgcctcagtcccccgactagctgggattacaaacatgcactaccatgccttgttaattttaatatttttagtagagatgggtttttgtcatgttcgccaggctggtctcgaactcctgacctcaagtgatctacctgccttgatctcccaacgtgctgggattacaagcgtgagccaccgcgcctggactctcctttttttttgagaaggagtcttgctctctcgccaggctggagtgcattggcacgatctcagctcactgcaatctctgcctcttgggttcaagcgattctcctgcctcagcctcctgagtagctgggattacaggcgcctactaccatgcccagctaagttttgtatttttagtagagacggggtttcaccagggttcaagcaattctcctgcctcagcgtccgagtagctgggagtacaggcgcacgccaccatgccaagccaattttttgtatttttagtagagatggggtttagccgtgttggccaggctggtctcaaactcctggcctctagtggtccacccacctcggcctcctaaagtgctgggattacaggtgtgagccgccatgcccggtgggtcttactttataaagtaggaagtaatgtatttgcatatggtgaaacataattaaagctgcaccagatggtattcatacagccggacttcgcacgtggccacctcagcctgctgacattcgccaacaggtcatcctttgtccctgtgttgtagggcctggactgcacattgcaggatgtttcccagcatctgtggcctctacctgccagatgctaagtcgtacctctccctcttcttcccagtggtgacaatagaaaatggctccaggcattgcgaagtgtccccttgggggacagaattctcccagttgagaaccacagtcaatagtgaaaggcccaagcccttcctcctaacaccagtcaccttgcttccctctctccatgtttcttgtgtgtttttccagagtccacgtctgtatcactgtaatggtggatacatgtcatacatgtagttatggttacttgattctgtttactttacttttatacaagtgatagtaagagtcatacataaatacatacaaaatggctttttttttctttttttctttttttttttttttttttgagatggggtctcacactgccgcccaagctggagtgcagtgacatgatcttggctcactgcaacctctgcctcccaggctcaagtaatcctccaacctcagcctcccaggcagctgggactacaagcatgcaccaccatgcccagctaatttctgtaattttgcagagacagggtctcactttgttgcccaggatgttttcaaactcctgagctcgagcagtccgcctgcctctgtctcccaaagtgctgggattgtaggtatgagccactgcacctggccttgatggcattttgaaaggtcttgtctcagaggaaaagatacaagccagagggcgctggtgatgaggtttggtctgtgccttgtgtcccgcttaggaggggatgggcagcgtgttctcacagctttttgctctgcacattggattcgttggcaaaacccacagtttccaggctgtcaccaaactttgcttatcacttcctgccctgttccccattaggaaaccacagcagaagatgcttaagagcaggactggcttttcttctcttttttctttctttctttcttttttaaagagacagggtcttgttttgctgtccaggctggagtacagtggcttgatcacagctcactgcaacctccaactcctgagctaaagcgatcctcctgcttcagcctctggagtagctgggattacagatgtgaaatactgagcccggctaccggctttacttaaccttttcttgagctttcttgccatttagtttcccggagtttccagagacagagtttgttgagctgtttggcaagaaacagatgggcctgggtgtcagctggggagaccttgtcctggccgaggcatcgaagcctctgactacattaggataaaatatgtggcctttagttcccctggaaggtgcctgagtgttttttccactggtgtgcattcctgtgcttcaaagacgatgaggtgtttacccagcggtaggtgtgatggaacacagaggccggggaaggccagggatgccatccagggactgatgggactgtttttctggaatggcaaacctggcatttaccacgtccacctaatgcactttcctaaaatagcatcgccaggcagccgtcaatatttaacattttctgtcttggatgatttgtgagcttcttgccttctgtttaccctgaatctccctttgttagaataattcatcattctctatggtaatgatctgtcctgtagttctctgctgatcatatcctagggcccatggagacactgccacgaccatgtcattttatttatttatatatttatacatttctgtatttttgagacggagtctcattctgccgcccaggctggagtgcagtggcacaatcacagctcactgcaacctccacctcccaggttcagctgattctcctgcctcagcctcccgaagagctgggattacaggtgtgcgccaccacacctggctaattttttgtctttttagtagagatggggtttcaccatgttggccaggctggtctcaaactcctgacctcaagtgatccgcccacctcggcctcccaaagtgctgggattgcaggtgtgagctaccatgcccagtcagaccttgtcattttgtgcttgtaccagcaaagcatagggaccttggcaaatagttcatgctctgtaaatgtatgtaggtaaatgaataaatacatgaatgaatgagaggttgaaataaatcatattaattaggaactgtcttgcaaataacagaaacctagcttaaatcaactagagtaagagaagagggggatttttgagtcacaaaactaaaaagtctagaaaaagacttttaagcatgaatggggttccaggcatggctggatctaggagttcccaagataatgttgggaataacaacgtctctgactctcagctctgctttcttgatggtggtttctttattagctggtagtttcctgatcatcctgtcacctcagcaacccctgtgaacagagagtcttactcttttcccctaatatttcctgcaaagctatgggattgagtctcattggttgtggtcgatcacatgcttcttcctgagccagtcactgaggccagggagataggatgcttgggtcagccagggctaggtcatgtctttcagggcttggggccaaggtagggggtgagggaggaggttcatctgtggctgaagctcataggttgacactgggagaagttcagttcccccagagaaaattgcatgttgccataaacagagtaatagatgccaggtaggcaggaagagcaggtaactgcacacagggcatcaggatttttagggagtgggctggagtgtaggggttccattcattggttttccacgtttctcagaaaaggcacctaggggacaggtgctcctcactgtgtatgaagggcttttgcaccctagaccctcgcctattacaaggcgaactccagtctcctgctgcctggagccccagtcattgtgcccgtcctaccagcctcttcggatttccaaacactgcctgcagggaacctgttaaagcctgtgcttccactagactgtgcgtctcagggttgccaagcccacctcagtccccagcgcatgatgggtgctcagttaccacctgaggggtggatggctagatgacctcctccttctggagaagccaggaccatggacctgaaaggggccgcatgatgttgtcctgtcccctctctgtgtgtgccctgtgctgccagcagccggcatcgattggtacttggctcaccaagggggctggtacgttttggtggtgagatgcctgaggcctggtttgcttcactgctgaagagacacctgtgatgtgctcttctgccctcaggcaaattcacctaccccgtccccacccatttatccactcccacccatccattatctatccagcagacattcactgagcaccatgatctgggctctgtcctaggctctgacaatacagcagtgcatactacaggtaataatctccagtcatggaacattcatttttcacggagagaaacagacaaggaaaaataggcacaataaataaatcctagtgctagagaaagccatcctaagtgctatagaaagaaaagagtcagatctttggaataagggcggcttgcagttttaagtagggtggtccaagctcactgagaaggtgacacttgaggaaagacttgatggaggtaaagaggccaaccagggagtagcaagagcatgtgcaaaggccctggggcattactgtgcccattcataggtgggataaccatggaggctgaaacagtgggagtgaggggagagtgacagatgacgccaaatgaggtacagggaagggactttacaaatcagctgggccttgggatctgagtcagcactttgacttctacactgaaaaataggttgactttggagaggtacttttttaaaaattacttgtttagagatgggggcctcactctgttacccaggctggtgcgggggcacagtaatagctcactgcagcctcgacctcctgggctcaaatgattctcctgcctcagcctccctagtagctaggactacaggtgcatgccactatgcttgacttatttattaatattattgttgttttgagacggagtcttgctctgttgcacacgctggggtgcagtggtgcaatcttggctcactgcaacctccacctcccgggttaaagtgattctcctacttcagcctccctagtagctgggactacaggcacatgccaccacacccggctaatttttgtatttttagtagagacagggttttgccctgtcagacaggctggtcttgaactcctgacttcaggagatccacctgccttggcctcccaacatgctgggattacaggcatgagccattgagcccagccacctggcttattttttaaaaaattttgtagagacacagccttgcttttttgccctggctctgctcgaacttctggcctcaagtgatcctccctcctcggccttgcaaagcatttggattacaggcatgggctaccatgccgatcgaaatgtatttttttaacggaggtataattcaccatttaaaagtgtgcaattcagtggtttttttgtgtgatgtgtggtggtgtgaaggtcacccagtgggttttttgtataaatgataatgacaatcaccactaattccaggacgttttcattaccccaaaaggaagccctgtacctgttaccagttgctccccaaatcttccattccattccaggcaaccagtaatctgctttctgtctgtctctgtttatctactgtggacttttcatataaatggaatcaaacaacaggtggccttttctgactgttttctttttttttgagacgaagtgtctcccttgttgcccacctgaagcgcaatggcatgaccttgcctcactacaacgtttgcctcctaggttcaagcgattctcctgcctcagcctactgagtagctgggattataggcatgcaccaccactcctggctaattgtgtatttttagtagagacggagtttctccatgttggtcaggctggtctggaactcccgacctcaagtgatccgcccgcctcagcctcccgaagtgctgggatttcaggtgtgagccaccccgcctggccatctgactggtttcttagcatgatgttttcaaggtttatccatgttttagcatgtataagaatttcactcctttttatggttgagaagtctatcatgtagatacatgtagaccctttcgagtaaagaatatctctgggctgggcatggtggctcatacctgtaatcccagcattttgggaggccgaggcagacggatcacttgaggccaggagctcaagaccagcctgaccaacatggcgaaaccccatctctactaagaaaaatacaaaaagattagctgggcatggtggtgggcgcctataatcccagctacttggagactgaggcatgagaatcgtttgaccttgggaggcagaggttgcggtgaactgcgatcgcaccactgcactccatcttgtgcaaaagaatgagactgtgtctcaaaaaaaaaaaaagtatctttaggtaagatgccagtgttgcgttaccgcttagaagatgggagccaggatgggtgcagtggctcatgtctgtaatcccagcactttaggtggccgaggcaggcagatggcctgagcccaggtgttcgagaacagcctaggaagcatagggagaccctgtctctacaaaaataaaaaaactagccgggcatggtggtatgcgcctgtagtcctagctactcgggaggctgaggtgggaggaatgcttgagcccgggaggtcgaggctgtggtgagccatgattgcaccactgcacccagggatcatgcgtccctgtcgtttcgagcaccttgcctccctcttgacatcggagcctggaaaatttctgtgccatggctcagcgtcatctgtcttgttaatgtcagagccagaacacgaaccagctctggcttcccgtgggaccgggctctcgcttgtgtgaccacgttaatagattccttggaagaatgatctaaggaatttggaccaaatcttccaacaagaaataaaaacagctgccatctgttgagttttactgtgcttgggccctgtgcaaataaacaccctacataagtgccaacagcccttaaaagcctatcatgacttccattttatagatgagaaaataggggcttgcctggagaggtgaaataactcaaccagggtcccacagcggaaatatggcaaagtgtatggtttttatttttaagctgtatgaccttccaggaagtaacaatgaaatggcagtgctgagaccctgaaaatacatgggccgatggccagatggcagggctatttgggtaaagtgggagagacagctcccttgaatggtgagagggaggagtcaggtggccccctggatggaagatggtttcaggcagaggaaacgtcaggggcaaaggcctggcttggggattgtgcttggtgcttttgaggaatactaagaatgcccctctaggacatctctgagaaagttgatgggagaggccggctctttgggctcccggtcgttgatttatccagttcattcccagagtgtttagtgagcacctgccatgtgccagatactgccccaggtttttccacgagctccagcagctggtcagttgtggccacctggggagggcccaagcgcgtctccagggcctgtcactgctcctaggatgatgactctcactcggggcacagcagtcagcactgggcgttctgcttgcaggtggccttgtgcacatttgccgtctacgtgaccattgacgagaacaacatcctggatgcccagacagccttcgtgtctttggccttgttcaacatcctccggtttcccctgaacattctccccatggtcatcagcagcatcgtgcaggtacagggggaagctggggcgacttccgagagggggccttggggttctaggccacgaaagcatggaagtgcccccgagcgcagcctctagatcacactcccggtcgggctccatgaggcccggacaaaggctgccatgctttcgtctggtcatgcctgaaagaaagaaaacacatttgacttcttgacagagaactcgcacttgagtatatgaatcaagtttaatgcagcagggctttcccatgctctggaagaatctttccgaaatactctgttctcttcagcctgttcctccgccattcctatcctttttttaaaaaacgtagctcttgtctgacttgattgattttacaacccactgataggtcttgaccacccacgctttgagaaaccccaaccttacagccgggcgcggcggctcatgcctgtattcccaccattttgggaggctgaggcgggtagatcacctgaggtcaagagttcgagaccagcctggccaacatagtgcaacctcatctctactaaaaatacaaaaattagccaggtgtggtggcgggtccctgtaatcccagctactcggaaggctgaggcaggagaattgcttgagcccaggaggaagaggttgcagtgagccaagatcgtgccattgcattccagtctgggtgacacagcaaaaactccgtctcaaaattaaaaaaaaaaaaaagaaaaaccccaaccttacggccgggcatgatggtacatgcctgtaatcccagcactttgggaggccaaggcaggtggatctcttaagcccaggagtttgagactagcctgggcaatatggtaaaaccctgtatgtaaaaaaaaataaaataaaataaaataaaaataaataaataaataaataaataaataaataaataaataaataaatatgtttgaaaattagccaggcatggtggtgtgcccctgtactcccagcgactcagaaggctggggtgggaggatcagctgagcttgggaagttgaggctgcagtgagtcatagtctcaccactacactccagcctgggtgaagggagtaagaccctgtttttttttgttttttgtttttattttttagaaacaatgtagaccatgtagaatctctaaaattcctgccattgactgtgtaaggaggggtggctttctgttttgtcacacttgggcactactggaagctcctgtcacttttctgcactgttttcacattctttttccgagcattgcgaacatcccttttgaaaactccattttaactacataggcaaatcaaccgtaaaatttggtagtacaaggctgatagcaggctttgtcaaaaacaaaaaaatccattttattatgaaaaatgtcaagtgtacacagaagtagaatagcttaaagtttgtaaactggcattaaaagaaaaagaaaaagaaaaaaaaagccaagcatgatggctcacacctgcaatcccagcattttgggagaccaaggcagacagatcagctgaggtcaggagttcgagaccagcctggccaacatggggaaaccttgtctctactaaaaatacaaaaattagccagatgtattggttggtgcctgtaatcccagctaatctggaggctgagacacgagaatcgcttgaacctgggaggtggaggttgccgaggttgcagtgagccgagattgtgccactgcactccagcctgggcgactgagtgagactcagtctccaagaaaggaaataatacaacatgaaccccgtgtacacatcactcagattcaacatcggcattttttggctgggcgcagtggctcacgcctgtaatcccagcactgtgggaggctgaggtggtaggattgcttcagcccaggagttcaaaatcagcctgggcaatgagacccttaatctacaaaaaataacaaaatgggtgtggggtgcatgcctgcagtgactacatgggaggctgaggcagaaggatcgcttgagcctaggagtttgaggctgcagtgagttatgtttgcaccactgcactccagcctgggcaacagagcaagactctgtctcaaataaagaaaccaaggttgggcgcagtggctcatgcctgtaatcccagcactctgggaggccgaggtgggcggatcatgaggtcaggagatggagaccatcctggctaacacggtgaaaccctgtctctgctaaaaatataaaaaaattagccaggtgtggtggcaggtgcctgtagtcccagctactcggttggctgaggcaggagaatgttgtgaacccgggaggtggagcttgcagtgagccgagattgcgccactgcactccagcctgggtgacagagcgagactccatctcaaaaacgaacaaaaaaacccaaaacattttgccacagttgatttatctcattctttttcagtatccctcccttgtccctctttcccttcatttgtttttaatgctaaactctgctatctatcccttcattctttcctttctttgccgaataattttaaagcaaatctcagaccccttacattctacccacaaatatttcagcatgcatttcttcctacataatgtaataccatcatcatgtctaagcaaactaacaataagtttttacaataatactcagcccatatccaagttttctggaatatctcagaaatgcctgtcccattgggctgtttgaattggctctgttgcatttgctgttacgtttccagagtcccttttccaccaggcctctgcccttttcttcttttatttttatttttatttatttattttttgaaatggagcctcactctgtcacccaggctggagtgcagtggcatgatcttggctcactgcgacctctgccttcccaggttcaagtgattcttctgcctcagcctcccgagtagctgggattgcaggtgcgtgccaccatgccaggctaattttatgtatttttttttttttttttagctgaggcggggtttcaccatgttggccaggctggtctcaaactcctgacctcaagtgatctgcctgccttggcctcccaaagtgctgggattacaggtttgagctaccgtgcccagccattcgcccattttttctgaaataccttttgtgggcttttaaaacaaagcagaaccaaacctgtttctttttttgttttgtttaattctaaagtatacactggttctaagaaatgtgggaccttcagaaataagggagggtgtgtgcccctccacacctggggaaacccttgaaagttaaccttggttggttttgcaaaaatgctttttaaaaataactctcccctgccattgctctctgtacaggcgagtgtctccctcaaacgcctgaggatctttctctcccatgaggagctggaacctgacagcatcgagcgacggcctgtcaaagacggtgtgtgtgtgttcagtcctggcttctggaagtggccgccttcccatctcccactgggtcctccctacttgcatttctttcccttggctgccctcaggtttgactctgcccagccgcttgtctgcgagaccccgggggacaagggttctgcagagcctgcagaagggaagggaagcctggcctcctgggcttctgtcctgtctcacacttcccaggagggtgaacttgcacttgcatttttgttttcttgctgagggtcagcagctgcttgaggcttccccgtgggagtcactttccaaggctttgaccttgattctattctgggctaaatgaggactctggaggctggccagcctccatcacccacaagctgtgtagacttaggtctgagcctcagttttatctagataagggaaacaaaagtacctttctttggctgagtgttacttggatttttttttttttttgagacagggtctcattccatttcccaggctggagtgcagtggtgcagtcacagctgtcactgcagccttgatttcgtgggctcaggtgatcctctgaccttagcctcccaagtagctagaactacaggcacacacagcaccatacttggataatattttggtatgttttgtagagacagggtttcaccatgttgtccaggccggtctcgaactcctcagctcaagcaatccacctgcctcagcctcccaaagtgctgggcttataggcatgagccagttctcctggcctttttttttttttcaatattaaattgttttatttggagagacaaggtcttgctttgttcctcaagttggtcttgagctcctgggctcaaggatccctctgcctcagcctcccaaagtgctgggatgacagatgtgagccactgcacctggccatgcatttttattggcaggtttgtttgttttgtagcttgttaatttatcgtttcccagcccatccccctgagccagggatgttgtttgtaaccatctctctaggcacttaataataaatattaggccgggcacagtggctcacgcctgtaatcccagcactttggggagctgaggcaggtggatcacttgaggtcaggagttcgagatcagcctggccaacaaggtgaaaccccgtctctactgaaaatacaaaaattagctggacatggtgttgggcacctgtaatcccaactactcgggaggctgaggcaggagaatcacttgaacccaggaggcggaggttgcagtgagccaagatcgcgccactgcactccagccagggcaaagagtgagacttcatctcaaaaaaaaaaaaaaaataataataataaatattaatggcactaagtgcagtgacacgttcacttataaagcctctgtcatgcacatgccattccaaggatgtcaatgtcccaacttgtccattactcaccatggtacccctggaggagggtgatggaaacccccattttccagatgaagaaactggtctctgaaacttgcctgagattgcacagctgatcaaaagaagaaccagcattcacacccacagcccatcggtagagtccatgctcttcctggccatagggtgttgcctcactgagatttactgagcacctactatgtgccaagcattgtgagaagtgctctgtgtgcactgcctcatagacaccccatcacagccctctgaagttgattgcatgattgtcagccttattttacagatgaaaaagtgaggcacaggctgggtgcagtggctcctacctataatcctagtactttgggaggccaaggctggaggattgcttgaggccaggagtttgagaccaccttgggtaatgtagtgagacctcgtctctacaaaaattaaattcaccaggcatggtggtgcacctgtagtcctagttacttgagaggctgaggcaggaggattggctgagcccgggagttcaaggctatagtgagctatgatcatgccactgtactccagcctgggtgtcagagtgagaccctgtctcaaaaaacaaacaaacaaaggcacagagaagttaactaacttgcctgtggctacccaggtacgaagtggtagccccaggattcaaacccatacagtctggctccagagtccaatgtcagaagattgaatgtgtgtaaacgtcggttataccgcgtgagctgtgtctggcacctcgcaggcgctcaggtatctttagtggcacctaaaacgtttgacacgtttgacacagcacctggtgcatagaagatgataaacagatcctgggagttgtcacttctctggtctgagcgagatggtctcagcatcttcagctcagccccctggtgtggggttttttatcctgggcgctactgacatctggagacacattgttctttgtggttggggactgtcctgtgcactgtgggatgttgagcagcaaccctggactctacccattagatacagtagtatccatcccaattttggcaaccaaaaatggctccagacattgccagatgtgccttgagggacacagttacctccagttgagaaccgtggcccaagtggatgctggactcttcctcccaacactcctgggctgtggtcatctggtttctgctgtcccagtgtcccacatcccctcacatcataaggcaatgattccatctactctggggtcaaatttctctgctaaccacaggctgaaatttgaggtggccggcggtgggtggggggtggtttcttggtactgaagttgttcacagctcaatgcaagcatcaggaaacccctaggcccctgggtgccgcccgcaccccagcccctccttcctgccctaatagtggcctcctaggtggttggacttcctggaatgtttagcacgctctagccagtgggggcccccttggctgctcccagctcccaagctaaccgttctctgcaacctctctgtctccagtggcttttcttaaattccttaaatagcaactcccagtttcctcattccacgtccactcgtagaagagctgagggagaaagttaatctaggttaaccagcaccttcctctctctctaggttttttgtttttttgatgcatggaggaagttatttcttcatttgacaacttaaacaaaaaatactcctgtattatctccagatggtcttaaggtggctcataattcagagagctgcttttctgttttttctttttctttttttttttttttttgagacagagtttcactctgttgcccaggctggagtgcaatggcacgatcttggctctctgcgacctctgccttggtttcaagcgattctcatgtctcagactcccgagtagctgggactacaggcatgcgctaccacacctggctaatgtttgtatttttagtagagatggggtttcaccacgttggccaggctggtctcgaactcctgacatcaggtgatctgcccgcctcggtctcccgaagtgttgggattacaggcatgagcccctgcgactggcctgcttttgttttaagtgagagacatgaagtaaaaggaaaataacaggaagaagagtaaaagaagacagaggtgctaggagctttagaagtgtggagctggccgggcatggtgtctcatgcctgtaatcccggcactttggaaggccgaggcaagcagatcacttgaggccaagagttcgagaccaggctgagcaacatgtcaagaccccacctctacaaaaaatacaaaaaaaaaattagctgggtgtgatggtgcacatcctgtagtcccagttgctcaggaggctgaagtgggagaatcgcctgcgcctgggagatggaggttgcagtaggccgagatcgcaccactgcgctccagcctgggtgcagaagccagatcctgtctcaggagaagacagaaacatggaaccagttaacgtgggctttgtctccgacactctccccttccctgtgccctcgtaccacacttcctgttccgtatcctctttttttgagtttatcgtgatggatgttttagaaagatccacctgctgtgatgtgctgtgtgtagagtggtgtggctgggggaggaagacagaggacctggggagaagggtgaacgacctccctttgcacctcaaggagggcccagcggtctgatgctggccaccccagtggagagaggtttgcatgtggacgccagctgtttcccactgaccttggccactgctcggccctcccagctggagctgccccgaacctgcctgagaagggccagggcatcgagagcattgagtaattctcatgcggcccccgcctctgcagtcatctcccaagatgatcgtccagatggcgcaaccccatcttacaaggacaaagctgcttgcagtttccttctgctttctgggtctggggctgcctccagaactgcaggttgagtttcttctttcagaacccgtggctgatgtcaccagataataatgcctagcgccattcgtgccaagcgtctggggttgaaccattcaagcagagaaagagagtgttctgtgcatgtggagtcgcacagctcagcctgtccctgacatgtctctgtgctttgtaggcgggggcacgaacagcatcaccgtgaggaatgccacattcacctgggccaggagcgaccctcccacactgaatgggtaagccgggacgtggacacacgtgatggtgtggagagagccacagggcttttgttaaacgtggattcgaattcccaccgtgctccctctctgtgaccttgaacaactcactttgcctttctaagacttagcttacccatctggacaatgggtgcagatacacctgcttaggctgtcgtgagaagcagacacacatgcctagcacagagggttccctgggattgtaagttacagcagccttggacagctagacttagacaatacaggagattcttggcttgcgtaactgggaagttctactttcaggtgcggtgtgatccagggactctgccgtcagaactttcttcatattttctgtgtttcactttctcctggtctgctttatcctcacgcatcctctccccttgtgatggtaaatggtcccaacagctcccactgtgtatcccactgttaggagaactgcctgcttcttattgacccagattgggtcctgtgccctctgtgaggcaatcgctatgccttcagacactgagtgtgctgattggccagtctcagtcaggggctgtgatgctgctgaactccagtgcccctcagctgcccagctcaccctttcttgccagctttctatctggcaccccacaccctacagtccttacctttccaaagcacatgatgtctaggaaattgaccttatccccaggcaacttgtcaagcacctctcattttgttctgaccagaggccttgatcaacagctttttaggcccccttaaggaatccgcaaaacacaggggtgatgggacccttttagaggtttagctcatgcctgggtagccaaatcactgctgtattttatgatgaaggagagaaactctccagagaaaacaatctgtagaaggcctgcattgaaaattcatgggggtactgcatgcttaggaagttcttccttatgtctaacttaaatcctgcctgcttcaattgtagctgttctgtcttgttgagctgcacaactaatctgtatctgtgtccctttcctgacccagtggttttcctgttcagttaccttccccccatgagcccccagaacctttctctaacccttttctctcatcagcctgtaagaatatttcagtctcacgtggacagtggcaggtactgtctcacgtggacagtggcaggtattgtctcactgggcttcctgcccactcaggccccataatcctttcccctcccagcacaggaacaaaaagcctgatgagtgtcaccatgcagcagtgtcataagaatgaaacaatcagtgacagcaacgactatcagcatttccactaatactctgaaatcagaaaggtggcagttaaaaagcacagaatcccagcactttgggaggccaaggtgggcacatcacctgaagtccgaagtctgagaccagcttggccaacatggtgaaaccctgtcactactaaaaataaaaaaactagctgggcatggtggtgcatgcctgtaatcccagcactttgggaggctgaggcgggcagatcactggaggtcagcagttcgagaccagcctggccaatgtggggaaaccccatctgtactaaaaatacaaaaattagctggatgtggtggcgctcgcctgtaatcccagctacttgggaggctgaggcacaagaatcatttgaacctgggaggcacaggtttcagtgagccaagattgagccactgtactccagcctgggccacagagtgagactcttgtctcaaaaaaataaataaatacttaagtaactaaatacagataaataaaaaataaaagcacattccatataagtgagtccagcaaaggtttggatgtgccctcccttccctgggaggatggaaaccctgctctggaggtgccgtcggcagtgggagtggcctggggttgacctgccccattgacagccggtcttactgggtgaatgctgagcttattttattttgctttctgctgttcgttaaaggatgatttcaatagagacatcttcctgaaattcaactcagatttattcatatgcgtttcccttttcaaccctttggtggctcccggctggcagagttcaggtgtcttagcacagcgtccttccagggcatatttcaaggtgctcccaggtctggccactacctacctcagtgccatcgcatccctggttacaccctgtgccttcacccctttacacctttctccggctctccacatgtttctgtgtgtgggacactcctgctttttgtcagagttttttggtttatttattttctgagacagagtctcacgctcttgcccagatcggagtgcagtggcacgatctcagctcactgtaacctccgcctcttgggttcaagtgattcttgtgcctcagcctcctcagtagctgggaccacaggccctgccaccaccacgcctggctaatttttatatttttagtagaaacggggtttcaccatgttggccagactggtctcgagctcctgacctcgtgatccgcctgcgttggcctcccaaagtgctgggattaccagcactggcatgagctaccgtgtccggccccagtttgtcttgaggtgtcctctcctttcagaccttgcgtcatgcccccagtaaagtttctgcctctccgaggggcaaaaactgttccagaagcccactgtgacaggatccctcaggttactccctgcctcacttctctaagggacacctgtcacctgcctcccacctggaggccccctgagacaggtcactgaactgaactcagcagtagaaatggaaggaatgttgaggccttcagtgtttagtacagtcttgccttctgtctttctctttctctacttggggtaaattgaggctcggtggccatgggcattagcccggcaggcctcattcagcgtggctgagccaggtgtgttgtgtcgtttcagcatcaccttctccatccccgaaggtgctttggtggccgtggtgggccaggtgggctgcggaaagtcgtccctgctctcagccctcttggctgagatggacaaagtggaggggcacgtggctatcaaggtaggatgaggaccagcggggaggggcagtggggaagctggtggtctgaggaaaagctcagaaatgatggtgtttcttttgactgtccctgtgccagaagcgaaagcagcaacgtctcttttcctcctcctcctgtatctttccactgtctctttctctctcgttctttctgttctgttccgtgctgtcctagaaggcaggattttggtatcatttatttccatctgtctcccagcacttaaaatagtgcccagtatatagtaggcacttaataaatatttattttgttacctctttattaagctgttattttattattattattatcattattattgtgtttttttttttttgagacagggtcaggctctgtcccgcaggctggagtgaagtggcgtgatctcggctcactgcagcctctgcctcctgggtccaagcgattctccctcagcctcccgagtagctaggattacaggcatgcgccaccatgtccagctaatttttatatttttttagtagagacggtgttttaccatgttggccaggctggtctcaaactcctgacctcaagtgatctgcacacctctgtctcccaaagtgctgggattgcaggtgtgagccaccgcatttggccacttaagaaatacttagtagacacacgaagactccctggtacgcagcctgtgtctccttcccttgcgtctctgcctgtcactgagtgtctcttggtctgtttgggtctttttggattgttctttatctttatggatctctgagtatctattcttataaatgtaacaaaacaaaaatgtttatgtggttggaatattttcttagaacattttttaaagggaacagtttaaatttttagtgttgaattcttaatatggagctaaaagaagactgcagttttactgcttttaaatacacagtgtactttgaagtaagttgaaattccccaggagtgagcttaagaggctcctttacaaataatccccactggaaatcaacagcctttgtttgcatttagttcactccccatgaaggccttttcctagtgtaacgacacgtccctggaagttttgctaccagcatttccaggagtgtggtctgcagccagctcatcttgcaggacatttgggcgataaagaaccccaggctcaaagaagcgtgggaaataatgcatactccagccccctccctcttggagacttacagtaaacattagcaaattaaaggctctgacaagtcctgcaaggagaaaaaatctattaactgtttaaccttatgtgtcccaggtgtacttgtccgcacctctttagtgtctgtgcaactgcacatttgtctcttggaatctgcctttgggaatgtcaagtttatgacgttgtttgttgttgtgggttttgagacagagttttttttgttgcccaggctggagtgcagtcgtgtgatcttgactcactgcaacctctgcctcctgggttcaaccgattcttctgtctcagcctcttgagtagctgggattataggcacccaccattactgcacccggctaatttttgtattttcagtaaagacgggattttaccatgttgacctgggtagtctagaactcctaacctcaggtgatctccccatctcggcttcccaaagtgctgggattacaggcgtgagccaccgctcctggcctagttaatgacattgtttttatttcagagcaaaaccctttctttgattatacagtgcctttagaaagtatacattgtggttgggtccaaattaatgacctttagctgttgttttaagaaatgttttatcattactttcaagttcctgccataaaataagatgaatgaaccatgagagctagattaatggaagaaaattccaaatcccgatgggatccacattgctttctgtttccttaaccccagctttctgctatcctggcactattagcatttcaggccagatgattatttattattggttgtttggcctaggtaaggggagtgctagaaatgtatataaaatatttatcttttcccaaatgttttagttggtgtggtttgtgtatattatgtctgaaatttctgtgggttctatggtaaggcaccactgttgacattttggctttttaaaagttaggatattcaagtcagcaggttaattatttgagaatttagagtaagaatgagggtacctgggacctgctgtcagctttgccctctctagaattcccttattcaagaatcttctggctgggcgcggtggctcacatctgtaatcccagcactttgggaggctgaggcaggttgatcacctgaggtcaggagtttgagaccagcctgaccagcatggcgaaaccccgtctctactgaaaatacaaaaattagtgggcctggtggtgtgtgcctttagtcccagctactcaggaggctgaggaaggagaatcccttgagcccggaggcagagactgcagtgagctgagatcttgacactgtattccagcctgagcgacagcaaggcttcgtttcaaaaaaaaatcttcaggggctccccttgcccctctgataaagcccatgctccccaccaagtataggcccccttgctgtccctggtgtgttttctgccagtcgttccctcacaggattgatcgatgttcctgtcacgctggcctttctgttccttgaatgtgccaagtacttttcacttccaggccttcgcatgtgctgttccctcggacttgaatgctcttccctcttctcctcatgaaactgactcattcttcactttttggttcttgtctaaacatatgtttgagctgagcatgatggctcatgcctataatcccagcacttcaggaggccaaggcaggaggattgcttgaggccaggagtttgagaccaggcttagcaacatggcaagattttgtttctacaaacgtaataaatatatagagaattaactacctcagcattttcattagcaaaatacacaaaacaaatatccttactctagcctttattctcatgctgtttgtgatacctgacatatggaaataaaaataagcctttgaaatggatgcttgatataggagtctttgcttcaatttttagcaaggatatttcctcaaagatccttcccggatgtcccaaactaggtcagtcttttaatttttttgagacaggatcttgctctgtggtccaggctggagtgcagtggcacggtgcaatctcagctcgtggtacctccatttcctgggctcaggtgatcctcccacctcagcctcccaagtagctgggactacagatgcacagcgccatgcctggctaatttttctattttttttagagatgggatttctctatgttgtccaggctggctttgaactcctgacctcaagcagtctgcctgccttggcctcccaaagtgctgggattacaggcatgagccactgcgcctagtcaagttagactcttaaaaagtgtcatatatctttttatctttgcgtccaccgtaactgtaatcaagtagttttccgtcacctgagggacttccactctttggaagcaggggttttgatcaccgctgtaggcattgagttaatagctagctactaagtaaataactgtaatcttatcaacgaggatatcaactctttgactcctgatattggagtcagtgattcacctgctgtgggttctgatcccagccctggcatctgttgtcctttgtgagtcagtttccctcttgccaaagcaatagttgtgatgaaaatgacttgtgaagtgaggccctcctagcaggcgggtgggccagctgttgtctcgttgatcagatctgtctgtgtgtctgtctcacctcgttctccatttgcaacttagggctccgtggcctatgtgccacagcaggcctggattcagaatgattctctccgagaaaacatcctttttggatgtcagctggaggaaccatattacaggtccgtgatacaggcctgtgccctcctcccagacctggaaatcctgcccagtggggatcggacagagattggcgagaaggtcagtataggttggatgttggcccctgaatcagtcagctgttgccgcgtaacaaatgctctcacaatctcagtgggctgtgagtctgctgctatcagctgacccggcagggctcagctgggcggctctgctgcacgctgcaggccagctgaacttgggtccaggctgtgggtgtggctcaggtctcacttacagagcttttgctggggaccggggtgaggggtccacagctttccaaaggggggctcttctcatggtggcagcagaggcccaagataggccccccagaaagcatgcaatgtcccttaaagtacactgtcccttctactcacaaagcaagtcacttggccaagctcaaaggcaagggaccaagaaggaagtacattctacctttgtggtcacatgactgcagagtcacatgacagagggcatgctgttgggaggaggggagtcgatgattcatatgttcacagtccctgtcaagatagccataatactgaaaatagcacaatagctaacacttactgagcattttctctttcttttctttctttctttttatttatttatttatttttgagatggagtcttgctctcttgcccaggctggagtgcagtggcacgatctcagctcactgcaacctctgcctcccgcgttcaggtgattctcctgcctcagcttcctgaggggctggaattacaggtgcatatcaccacactcggctaatttttgtatttttagtcgaggcagggtttcaccatgttggccaggttggtgtctaactcctgacctcaagtgatccgctggcctcagcctctcaaagttcttttttttttttgaaatggagtctctctctgtcgcccaggctagagtgtagtggctcactcttggctcattgcaacctctgcctcctgagttcaagtgattctcctccctcagcctcttgaatagctgggactacaggcccctgccaccacgcacagctaatttttgtatttttattcgaggcagggtttcaccatgttggccaggttggtgtctaactcctgacctcaagtgatcggctggcctcagcctctcaaagttctttttttttttttgaaatggagtctctctctgtcgcccaggctagagtgtagtggctcactcttggttcaacctctgcctcctgagttcaagtgattctcctccctcagcctcttgaatagctgggactacaggcccctgccaccacgcacagctaatttctgtatttttagtagagatgggatttcgctgtgttggccatgctgatcttgaactcctggcctcaggtgatctgcccgcctctgcctctcacaatgctgggattacagatgttaaccacctcgcccggcctataacttgagtattttctgtatgttgggaactatgctaaacattttacacgtaattcttccccacagcaagcccatgggtggaatttgttgttatacctaggtaatcattgaggaaaaaggaggcacagagaggccaagtgacttacctgaggccacacagccacagagctgcagagagcatggttcctgtgtccatgttgttacctgctcattttgtcatctctaaaagggccattctctgcctctcaccactgcagaccctccctcctgctgtgctccatctcccaggttttcctgctgcttcacagcaacccccagcccctgcccacctccacaccttggtctgagccttcaaggcctggggtgcctcccctgctgcttgcctggccactttgctctggcaccccatggtggtcgtctggtgtgtcccctcttggaagaccaagagtgcaaagcactggcccatttctgtttttagttacaagccaggggctctgtcggctttcttacgtggtgaatgatgtttaaaaattgagataagcctgcagctccttggaaataaaaaacgaattattggctgggcgcggtagctcacgcctataatcccagcactttgggagaccaaggtgggaggattgtctgaggtcaggagttcgagaccagcctgggcaacatggtgaaaacccacctctactaaaaatacaaaaagttgccaggcatggtgccgtgcacctgtggtcccagccacttagggggctgaggtgagaggattgcttgaacctgggaagcggagattacagtgagctgagattgtgccactgcactccagcctgggcgacagagtgagattctgtctccaaaaacaaaaagaaggcacgtggctgccaggaccccacctcagtgcatgggagtcagggcaggcatctcaggagggactgggcagtaacctgtgatttccagccaaatagggaaacgacgttggcttatctgtcatggtgggagctggcgctgctgctggtccatgcattgtccttcctcctggtgactgggatgtgggctggatttcagcatccccaggccggagccttgcttcacctatatgtggctttgccagacagtgacagatccagagtaagctggcaaacatggcagctgtcaccaacagcagcagtaacaataatatgaccacgtccaccagcgccttccatgagactaagggatcacggccttcccactggtcaacatgatttggtgccgtcagccatcctttgctgagcacttgctgtgcaccacgtgccctgctcagcacctcacgggagattcaggttttctcttttgcccagttgacaggtggggctaaaccctgtgcctgtgatcccatccttggtggtggtggagctggggcctggctccaggtttgtgcaggcgtgacctcatgccttcagcatcaaacttaaagaagaggaggtgggtgcagctctgcagggccttcacccaggacctgctgtgtcctgagcaggctctatgcctttctttctttcttgtttaaagagacagggtctcattctgtcgcccaggctggagtgcagtggcccagccatagctcgttgcagcctggaactcctgggctcaagccatcttcccactcagcctcctgaatagctggaactacaggcgcacatcagcaggcttggctaattttttcttttcttttcttttctttttttgtagagacagggtctccctatattgctcaggctggtctcaaacccctggtctcaagcagtccttccaccttggcctcccaaagttctgggatcacaccacactcggcctgcttctacgtattgtgagtctcaagatttcccaggaaacccactcctgtgtgtgtctctccccagggcgtgaacctgtctgggggccagaagcagcgcgtgagcctggcccgggccgtgtactccaacgctgacatttacctcttcgatgatcccctctcagcagtggatgcccatgtgggaaaacacatctttgaaaatgtgattggccccaaggggatgctgaagaacaaggtgcctgctggcggggtggggcttggtgttgggccgtctcgccctttggttaagtcagaacgtgtcccctttaggagtcctttactttctctggctttctttgtttttaattggactttaaagaacacatttctcatgcttgtcttggaagccttcctaagacagccgtcttgtacttgtctttataggggtaagtcctccgcgcagagttaaattcattgcctctccatggccaagggaggcctctcttcctgattaagtcacagggctggcttcttagcggggaatcccactccaagacattgcctgtgacctagcaggctgcattttcttacttgcagaggtgtctgtgggtagaggggtcggaaaattgccacaacaccttaacataataggaaatagttcctgtgttctttttatagggcagttgtggtaatgggtacacactggctcttttttttctccccctgattttatttttttgaggtggagtttcgctactgttgcccaggctggagtgcagtggcatgatctcagctcactgcaacctccgcatctcgggttcaagcacttctcctgctttggcctcccaagtagctgggattacaggtgcccaccaccacgcctggctaattttttttatttttagtagaatcgaggtttcaccatgttggtcaggctggtctcgaactcctgacctcaagtgatctgcccgcctgggtctcctgcaatgctgggattacaggcgtgagccaccacacccggctgtttctgctgattttaaaactaacacatccccatggggggcatatagattaagaaaaacatgaaaaagaaaaatggaagcagttacacacattccactggttagaggttttgtatttttttcaagtctttttgctctgtgtataaactttttaaatagggttatcttgttccacgtatatatacaggaaacatcgtgctacatgacctcttgtaatcgttcccatacataccactaacattctgtgtaaacatattttaaaatagtacaaaacatttttgaaaattactaagtaatacatgcccattgtaacaaaattgaaaagtacaagaatatggatatcttcttataatatatgtgtgtatgcgtgtgtgtgtgtgtgtgtgtgtgtgtgcatgtatataaagtaaataaagctgggcacggtgagtaatcccaacacttttggaggcctagaccagtggatcacctgaggtcaggagttcgagaccagcctggccaacatggtgaaaccccatctctactaaaaatacaaaaatcagccgagtgtggtgatgcatggctgtaatcccagctactcgggaagctgaggccggagaatgtcttgaacccgggacgtggaggttgcagtgagctgagattgcgccactgcactctagcctgggtaacagagcgagactccgtctcagaaaatatatctaaataaagtaaataaaatagtccctcttcatcctgcatccctaatctttaattcttctcttagagagcaagggttagcaaatctggcccactgcctgctttttatatggctcttgagctaagaatgatgtgtgtatttttaaatagaagaaatctaaacaggaagaatattttatgacatttgaaaatcgtattaaatttagatatcagtgtccataaataaaactttattggaacatggccaatgtattttttttctttttttttctgcagacagggttttcctctgttgtccaggctggagtgcagtgccacagtcatggcatggtagcctccagctcctcggctgaatcaatcctcctgccttctgagtagctcctgggaccacaggcatgcagcaccatgcctggctaatttatttttatttttattttgtggagacaggtctcactatgtttcccaggctggtttcaaactcttggcctcaaggaatcctcccgttttggcctcccaaagtgctgggattacaggtgtgagccaccgcacgtgtcctgttctttaaagcatcgtctacagctgcttcaactcggcagggctgagttggtgccatggcaactgtaagatccataaagctgaaaagattgaccgttagctgtttaaggaaacatatgctgacttctattaatagtttgatgaatgtcttcccaaactttcagatttgcagataaaatgtatgcatgtgcatattttgtagtggttttgggggtggctgacagcgggagttgttttagaaaaaaattaagccagagctgggcacggtagcgcatgcctgtagtcccagcacttttgtaagccaagggcgaatggatcgcttcagttcaggagttcaagatgagcctggacaacatgatgagacccctgtcttgacaaaaaatacaaaaattatctgggcatggtggcacgtatctgtagtcccagctacttgggaggctgaggcaggagaatcgcttgaacccaggaagcataggttgtggtgagccgaggtcgcaccactgcactccagcctgggcgacagagcgagaccctatctcaaaaagaaaaaaaaaaaagaagaaaaaaattaagccattgggctgggcgcagcggctcacacctgtaatcctaaaactttgggaggccaagataggcagattgcctgaggtcaggagtttgagaccagcctgggcaacatggtgaaacgccatctctactaaaatacaacaacaaaaaaatcagccaggtgtggtggcgggcgcatgtaatcccagctacgcgggagggaggctgaggcacgggaattgcttgaacccgggaggcggaggttgcagtgagccgagactgtgccactgcactccagcctggacaacaaagtgaaactctgtctcaaaaaaaaaaaaaaaagccattgcatacaaactgttttgctgtggcaccatccttttattcctttacacacttgtatggttccctccctacctcttgtcattcaggtttttgttaaaaaataaccttccccattacctttgttaaaattgcaaaacccgcacacttggtacacccgttcccctttttgctgtgtttttgccattcagcaagcactattctactagtgttcgtttctcctgcggccctggaatctggggcaggggtctttgtttccttccccttccccagcttttagctcagcacctgaggcgtggcaggccctttgcacatgcatgttacaggaccgtgtgcacaggttcagctgctcctggatgctgttatcgcgggtgcatgtcccaccttcagacctgagttttgcccaccaggtgttcgtcggctcattcctcctttagtcttcactctgccaagctaggcagtctcacacatgtgcactcacgtggccgggtgtcccctttgcccacagacgcggatcttggtcacgcacagcatgagctacttgccgcaggtggacgtcatcatcgtcatgagtggcggcaagatctctgagatgggctcctaccaggagctgctggctcgagacggcgccttcgctgagttcctgcgtacctatgccagcacagagcaggagcaggatgcagaggagaacggtaggggcagccccagggttccacccactcagggtgtctggcaccttgaagggccacattggcctctttgaggttgccaccagccacttggggaaggcggctcctcagggcatgagggtgggagctggatggagccccctaaagaagcaatgtggaaaaccaccttagtccctgcagcgctgaactgggagagagtctcggtgctttatggccaggggatgggagcaccaggcttcagctcagctgacctcagggcagggtctagcgccttcctggaacatgaccttggacctgatgagtttcagggtccttatggcaaaaatgggaatgatggtaattaaagtcctggctctcggggctgagagaaactgaggacatacgtgacacaagagatgtgagggttgtgaggtgaagcacggagttaagctggcaggctcgggttggtgacgtctgggttcaatccccggccgctcatctccccagctatgtgacctgaggcctgcccttcagacccatctgagcttcactttcctccctcataaagcagttcagcagggccagacgtggtggttcccagcacttgtaatcccaacacatagagaggctgaggtgggaggatcgctccagctcaggagtttgagaccatcctcagtagcatggcgaaacctcatctctacaaaaaatacaaaaaatttgccaggcacagtggctcacgcctgtaatcccagcactttgggaggccgtggtgggtggatcccttgaagccaggaggaattcaagaccagcctggccaacatactgaaaccccaactctacaaaaaaaaaaaaaaaaaaattcagatgctattaagtgctttggaggggaaacaaaaaagacaatgccatgggctgaggagtgatgggtgtcattgtggcaactcaggcaggggatagggaaaccctctctggggaggttgcattggcatgggaaggagccagcagggagaagatctgggaagtgttgtgggcagagggaacagccagtacaaaggcctcaggaccagcatgagctcaatttgtttacaaaacaaaaagggtggtgtggccagaccatggtgtgccaggacgtggggggcaggagaagaggtcagcacagtgattgtcctgcagggccttccaggtgggttttggtctaactgccctgggaagccactgagtgtcagagaggcaaagtgaccagccccaggatacacagcagctgctggcagggttggttctcaagttggtctctgagtttctcatcctttgcctggggtgggagctccttctctgcagaggtcctagtgatctctaataagtgctttcttgagatgtaattcacacacgtaggctgggcgcagtggctcacgcctgtaatcccagcactgtgggaggctgacacaggtggatcacctgaggtcaggagttggagaccagcctggccaacatgatgaaaccctgtctctactaaaaatacaaaaattatcctggcgtggtggcgcacgcctataggcccagctactggggaggctgaggcaggagaatagtttgaaccttggaggcggaggttgcagtgaaccgagatcgtgccactacactccagcttgggcaacagagcaagacttcgtctcagaaaaacaaaacaaaacaaaacaaaaattcatacaacatacaattaacccacttaaatcacaaaatccaaccatcaccacagtcaggtttagaactttttttaatcacccccaaaagaaaccccaatccatcagccatgactccctattttccccagcacctccgaagccctaggcaaccactaatctttctgtctctctagatttgcttattctggacatttcatataaatgccatcacaataggtggaatgttgtgactggcggcttttacacttagcgtggtgttttcaaggttcgtctatgttgtagcttcatttccttttattgcggaataatatgccattgtgcagatagaccatactgtgttgatctgttcactggttgatggacattcaggttttttccactttctgactcttgtgaatactgctgtcatgagccctggtggttttaaaggaaaagttggtggccgggtgtggtggtttgtgcctgtaatcccaccactttgggaggccaaggcgggtggatcacttgaggttaggagttcaagaccagcctgggcagcatggtgaaacctcgtctctactgaaagtacaaacattagctgggatggtggtgcacacctgtagtcccggctattcgggaggctgaggtgggggaatcgcttgagcctgggagtcaggctgctgtgagccaaaatcatgccactgcactccatctggcctgggtgacagagcaagaccatgtctcaaaatacagttggatttttgtttcttgccagtgcatgatagctgacattcccttcagcttttaaattatttgattagactgaatttctgcatgttcattcccttgtggttgggaagttctaccttgagtctagcctgtttcttcttgctgcagaatccccctttgtctatctctcagcccgagcaatgcattgtggcaacttctcggtgactttttcactgacctgcttggcaggctacttttaggtgacaataccctttgtgctctctaaatcaaaatgtgtgggtttagctgaatcttttgcccagcgtgaggtctgtctctctacccttccgtccaggtgagcaaaaaatgtccttaaactctcttggccccagataggttccgcacccccgcctttctttcccagctgctagagtatccaagcagtgtatacagaacatggaaggctgccagatgctttgtgatttttgtacacatcagcacttaatttggtgatgcaaatgccgcccaccaccctggcacctcgtgcgttcattttcccagtttgacctccctacctcctgcctttgaggttacatagaagtccttggcagtgggtcttacatcaaactggggcacccccctctctcaccacccacccttttccattgctctggaggggccctggctataaagtcttgacatcagggtctggtcttgcccagccttagccaactcgaagcgccaatgaccttgggtttgtttaaaccacatttttggctcttcctaaaggggaacttttttccttgttggattaatcagctcttttttttagaacacccaggctgaaggggtgcaggtgttggtatttggtttgggagaatccttgaggggggatgggcaggaaccaggcttgtgaatggggccataccgacctctctcccgggatattcagtttactgatttctaagaaatatatcttttttactgtttgtctccctctctccttttttttttttttttttttttttaacttttaatggcattccttttattcctaatttattcccatgccataagcttttgtttcttcaatttcttctgggatatatttttcttctgtgcagcctccccttccggtttaggaacagtttgttccctttcaggcaggatcatctggatgtggcagagtgagctcacgtatgggttaatccgaccgaccctgagctctgtaggtccggcgacgcaacttaggtgctttcttcagttggatatgctcaaggaccagagaatctgcatctgaacccttaagttcagtgtgactctctgtatttttaagcatgtgcagcagaaattcagtgctctttttgggccgccgaccttgtggccagccccacttcttggcctgggtacatctaccaactccaccattataatgtcagaatggtacatgttgtttctgtaaagtggcatctttctgatactttgtggccttttgtacgtgcatacctttgatggcctgggcgctttcaggagtgttctttttctttttcttttttttgagacggagtcttgctctgtcgcccaggctggagtgcagtggcgcgatcttggctccctgcaagctctgccgcccaggttcacgccattctcctgcctcagcctcccgagtagctgggactacaggcgcccgccaccatgcccagctaattttttttgtatttttagtagaaacggggtttcaccgtgttagtcaggatggtctcgatctcttgacgtcatgatccgcccgcctcggcctcccaaagtgctgggattacaggcgtgagccactgcgcctggccttttttttttttttttttttttgatacagagtctcacttgttgcccaggctggagtgtagtggcacgatcttggctcactgcagcctccacctcccgggttcaagaaattcttgtgcctcagcctctcgagtagctggagttacaggcatgtgccaccacgcccagctaatttttgtatttttagtagagatggggtttcaccatgctgaccaggctggtctcaaactcctggcctcaagggatcctcctgcctcagcctcccaaagtgttgggataacaggcatgagccaccatgcccggcctcacaaatgttcttaaggtgaacacgaagatttgaacctcttgatctgcatgattctgtggtgttttctggataaagtgaatagtgaaccattttcacagattgcctcaagccccttaggggaacaaatttttaagggatttaaaaaaatggctcattaaccttcatacctggaaggtaaaacacatcttcatgactctggtttctttcttaggaacctaatacctagagcagtggttttccatcaggggcaaattgcccccaccctggggacagttggcaatgtttggagacatgttgggatgtcaaaactggagtggggtttgcccctggcaggcaagcagggtagaggccagcgatgtcgctaaacatcctacagcactcaagacgaattcccccttaccctgccccccgtgacagggaatccccttgccaggacatccaaagcaccacgagcaagaaaccctgtgtgctccgacttcacactgctgaattcttcccttgtcctcttgggagaaggatctttattccaacaatgtggccatttttctcttttaaaaaattttatttatatatttttatgtttttttatggagatgggatatcagtctgttgcccaggctggtctcgaactcctgggctcaagcgatcctcccaccttgacctcccaaaatgcaaatgctgggattataagcatgagtcgcggcacctggcccgtggccatttttcaaaaccttgcttgaaccatctgttaacctcatggcaaatatttttccctcttaagtatttaccgagtttttcttaatgattataaaagcaacatgtgctcatcgtagacatttgcaaactacaaaagagtacaaagaatcaggaaaaaaggtggctcatatgtgtaatgccaggactttgggaggccaaggtaggcggatcacctgagggcaggagttcgagaccagcctcgccaacatggtgaaaccccatctctactaaaaatacagaaatgtcaggaggctgaggcaggagaatagcgtgaatccggggggcagagcttgcagtgagccaagattgtgccactgcactctagcctgggtaacagagcgagactgtctcaaaaaaaaaacaaaaaaacaaaaaaaaactcccgagaaagaacatctttctgccctcactgcccagaaggggagctgttgttagctttggcatctttttcacctgtccttccttcctaggccttctcccttgacaagattgagagtatatcttagagttttctcatctcctgccaccttttgatttcttttcttaacagtgggccataagcacctccccaagttacacaaattagttgtcagcacagagcagctgccgagagagttcatcagacagacccccacattccttctggctgtcctcagaggccggatttcttcctcttttgaggatgaagagctttctctgccgaggctgggggaggaggtcagtgaggcagccagtgaatgccgtttttggtcaaaaatgaggcgttgactataaagctgtgagttgaattcttccctccggggaggctggcctgctggaccttgcccaagcagagttccagaaccttcttgagtaaaggcagtgttggtggaataaacagtgagaggactggcaacggaatacacagacccggggcagcacttaacgtacgtgggtcaagggtagaaacagcacctggcttgacagcatccaaaacccaacacctggtggttgcatgaactcagtgacagtcactgaattacaagtttcgtgtgtttgctttaaaaaaaaaagaaagaactcttgctactttatagcattctccaccctggcccccagccttcatgtccctcttcttccctgctttgattactttgtggcacttattgctgcctggagtaaattatggatctacttgttcatttattgttgatctcttcctttggaatttaagatctgagggttttgtttgtttgttttgttttgttttgtttgttttgggagtctcacgctgttgcccaggctggagtgcaatggtgcaatctcggctcactgcaacctccacctcctgggtccaagtgattctcctgccgcaacctcccaagtagctgggattacggatgcctgccaccacgcccggctaatttttgtatttttagtagagacggcgttgtgccacattggtcaggctggtcttgaactccggacctcaagtgatccacccgcctcagcctcccaaagtgctgggattacaggcatgagccatcgtgcccggctgctctgagggctttttggttgtctctccatccccaggactaagaaaagagcctgacacatagtagacactcagtaaatgtgttaaatgagtggatgaatcgcaccttggctgttcaaggcatgtcctgcataagcagtgggtaggccggagggctttggatgtttacactgcagataaatacctcagactaggagaaaataggagtggatttcaccccctctcaggtctgctttagaaagcagctttgtcagtcctgcctatgagaggggcccctctggcattgggaagtcagctctgcttcttgacttgactatacacttgtcagtctgcccatctgtctgtcgggtgtgtacagagtgcctgctgtgtgccacaaggccacctggtacgtgagcctctgtgtggaatggtgccccccacgttgagttgtgcagtgtgcatcttgtgtaactgcacttggccacctgctgtgccaggtgctggtgatacagtaatggatatgacccacttcatgcccttgagagctcacagtctgatgggagagacaaacgccaaacaattaagggtatcatagtgctaaatgcagtgatggagggctgcttgagggcctgggaaatcacagagaaggagcccccatcccagcctgggagggtccagggtgatatctgggctaagtcaccttttcttctcctcttgggcacatgtgcatctggctctgtgtggggccagcccctctcaggagcagtgtctgtcctcaaaggggctggagctgatgcccatgccacctcccagtgtcatgcctggcctgcctactgtaatactttatttcttttcctctcctgcgtaaaaacaagcctgaagactgaaggttggtctgcattatttgtttagctctatttatggttaaacacagttatgactttggccaggcatggtggctcacgcctgtaatcctagcactttgggaggccaaggcaggtgtatcagctgaggtcaggagtttgagaccagcctggccaacatggcaaaaccccgtctctactaaaaatacgaaaattagccaggtgtggtggcgggcacctgtaatcccagctatttgggaggctgaggctggagaattgcttgaacctgggtggcggaggttgcggtgagctaagatcacgccacttccctccagcctgggctaaagagtgaaactctgtcacaaacaaacaaacaaaaacccaacacagttatgactttggagaaaggggttggtcttgtgcagtgtgcttgtcccggatccacccagcacatgtgggatggggaaactgacgcacaaatggagcagacccttcagccattcttgcctctccccctttagaaaagacactcccttcactcctttatttagataggggcttagggcgggagtttcgctttgcttcttaacaatatcttgggtcttctgaattcccaggcagcacagtgatggacgaggaggaagcaggtcagtactgcccgggttggagttggcttggctcatagaatgaggccagagacgggccgagactgtcgctgcatgtctggggaggtgccgtcagatgtctgtgttttcacccctccggttgttcattggttcatttagcacacatttactgggtacctactgtgtgtctggctttgaggctggcactgggggatacagcctgagtccccagatccctttattgtcactgatgaccttgggtaagctctactgtttcatgcatcacgttaccgtgaccagcatgccttgaggggaccatgcttatgaagtgcctggcacacagtggatggacaataaatggcaacagtttgattgtgagctgccacgcatagatcctggggcacagtcaagacacacatgggcccagacaatgcagggtgatcagcgcctgttggggaactgcagcaggtggtggtggggaccctgaagagggatgtcgcctagtggaattccagtggccagactggacccatccctcctgccttctgcagtgtgtggcttagggtcccagccaagggctttttttgtaagcagcagaagctgaatctggccaccttaaacaaacagagggtgtttcctggaaggataccaggtaactcatgaatcaaaggcagaactgagcaagtaggactcaggaaatgggaactctgggagactagactcttttaggacaggtgaacttgaactgtctttggtccttgtagaccactgatgacggttcaaatcctgggagaggggcttttatggggcgacctcagacagtgcccaccttggctgggggaatctgaggcaccctgattgacaggcccaccaaggctgtaggaagagggagagctgatcccttcaaaaagccaacagggggccaggcacagtggctcacacctgtaatcccagcactctgggaggccgaggtgggtggatcacctgaggtcaggggtttgagaccagcctggccaacatggtgaaaccccgtctctactagaaatacaaaagaattagccaggcacggtggtgcatgcctgtaatcccagcttcctgggaggctgaggtgggaggatcgattgaacccaagaggcagaggttgcagtgagccaagatggcaccagtgcaatccagcctgggcgacagagaagaccttgtctcaagacaaggaaaaaaaaaaatgctgagaggatggtggactaactgatgttcagattcctcctcttaggcgcttggtcctcctccgtgcagagtggaattttccagctgcccagttcgacctgtgggctaattggtgggttgagagggtaagacagccttagcgagcactgcatgcctgcagaagctcccagctgaccatggtggctgcgctcagtgacgaacaggagaagtgaaggctgaggcttataggagggtggcctgaggctgctggtaggagaggggggggctctctgcggcatgcagcctccagatgggggtccctgggagtgttctggaacattctcatccctgcacagagaaagatggttaagggcatggctggttcccagtgtcacacatgtgtgtgaggacaggctgcatgggaagtcctgcttggtatcattcttccttcctgggtgatgtggctatttgtgttttgtttgttttttaagttagtgtttagttagtttagacaaaacaaaacagatgctgacattaaagggaatgtttaaagcagagtttctcagttcctggctgtgcctagaattctctgtagaacctgtttaaaaatgtatttagtaataagcaacacgggggtcgccatcactgaacacttgctgtgccaggcactgcgtgcagtctcgtttcaccctctcgcaaatgaaggttgggtctgctgttcctgttttgcagatgtggaagatgaggctcagacagatttatcatttccccaaggggcacagccaggaagtgagagaacacttcccacatatcacagttcctggagctctaatcgagactcatagcagggactgggctggacacgagggcacctgctcagtttttaattttaattttttggtttattttcttttattcgtgttttttagattttttttttatttttattttttatttttatttttagacagagtctcgctctgtcacccaggctggagtgtggtagcatgatttcagctcactgcaacctccgcctcccgggttcaagcaattctagagcctcagcctcccgagtaggtgggattacaggcatgcaccaccacgcccagctaatttttgtatttttagaatagagttggggtttttccatgttggccaggctggtcttgaactcctggcctcaagcgatctgcccgcctcggccttgaaagtgctggggattacaggtgtgagccaccgtgcccggcggccacctgctcatttataaagccccccgtgactcatttacaaccaagactgagaattcctggcatggagtgcctccctctgtccaggaatgatctgcagccccctcttcccttccaggtgtgtctgtgtctccctgtggctgtttctgcaagattttgcatttttgagctctgcttttattcatgtcatcacccgagcatgttcccagggtcaccctgaccatgctgctggctgcgtatttatcccttttgtatcttctgtcctgggtcctctcccaccttctctggggtcagccctgtggtgccttacattgtgctgctttctctcctggcaccaaagaatgaggcagtcagtgcggagtgggggcagtagtcatcatcatcactgagttattgtgaaccgggaaagagatatgatctgtgttgacacgacacacggtgcccgagtgcacttgataaatgttggctgtcattgtcattgttgatgttccggtgattattgttgatgctgggtggattcttcctgggatcagggcagatatccagctgctgtgtcccttggtgtccttatcagtgtccttcctaattctgcaaccaaggcatctgccagggctggggtctcatctgaagactcaatcagggaagggtccactttgaagctcacctggttgttggcagaacttggttccccagttcaaatgttgaaatactttattactgtggaaacagccactgccccaggtaccttttaccctgaactcttgggacctctctgtggtctaggaactgaagggttaactcctggcactacaggggtctccgggcctctgcctgttggctgatggccttgtcaaattggttatctattttgaatatcacttcttctttcaatgcttgggaatcacggggctatgccctttccctcatgcgtttccttgcatcctggtcctaggaagtgagcttaacatagcagggctactgttttctgggctgggttttacccattgctgctggcacaggatgctggctcaggcccagtgccctcagtggatggagccttctgcacagttgcaaagcactgtccctaccccaagggactgagctccagataccacctgccccacaaccagacagcctgttcatggcctctgcagagcaggtctcctactttctgatcatcctggcggccaggtgctctgtggtctcctcactgaagtggccggtttttgttgcccttggttttagcatctgcctcatataaccccacttgccccctttgtctctcttctgccaggggtcacgggcgtcagcggtccagggaaggaagcaaagcaaatggagaatggcatgctggtgacggacagtgcagggaagcaactgcagaggtaagggcggggaggaaggccccaacctaaggaccctgccctgccagtgggaggacaagaggaggaacaaaaaaaggcctcagccccctgaggtcctggaaggcctgggcttttaccttccctcccaaatcctccaaggaccttgcttttcagagtacagaggcccaaagaaggaatgtggcactctttttgccaggtggcacaactcacacaggcctcatgatttaaccagctgtccacgcttctgacactcgggctccctacatggtgtgggtctttgctcaggtctcttggcggggcctggaaggttcaggctttgtgaagcagcatttgatttaaaactgtctcaaggccaggtgtggtggctcctgcttgtaatctcagcactttgggaggttgaggcaggaggatcgcttgaggccaggagtttgagaccacagtgggtaacatagcaagacctcatctctacaaaaaaggaagtatgctcgtgtttgattatagagggcttccttagatccctggggatttatagcgtatgcagtatattaaccatcctagcttttaaaaaactggctaagtcggccaggcagggtggctcatgcctataatcccagcacttcgggaggctgaggcgggcggatcacctgaggacaggagttgaagaccagcctggccaacatgatgaaaccctgtctctactaaagatacaaaaattagccaggcatggtggcaggcgcctgtagtcccagctactcgggaggctgaggcacgagaatcgcttgaacccaggaggtggaggttgcagtgagccgagattgcgccatggcactccagcctgggtgacagagcgagactccatctcaaaaaacaaaaacaaaacaaaacagcagcagcagcagaaaacagtaaaacaacaacaaaaattgacaaagtcggagcctaaacgtatcagaccgcggagatctgagaaaggatcccggacctgcagttgctacaggggtcaggagagagcaaagaccatgcggcatagcacggtgcctggaacagacaaacacttcgtagatgtcgcttttgccatggttatcatccggacatggttatggtccggaattggtgggtcttggtctcactgacttcaagaatgaagccgcagaccctcacggtgagtgttacagttcttaaaggtggcacgtctggggtttgttccttctgctgttcggatgtgttcggagtttcttccttctggtgggttcgtggtctcgctggcctcaggagtgaagctgcagaccttcgcggtaagtgttacagctcttaaggtggcgtgtctggagtcgttcgttcctcccgctgggtttgtgctctggctggcttcaggagtgaagctgtagaccttgatggtgagtgttacagctcacaaaggcaatgtggacccaaacactgagcagcagaaagatttatcgcaaagagtgaaacaataaagcttccacagtttggaagggtaccccagtaggtggccactgctggctctggcagccagcttttattctcttatctggccctacccacatcctgctgattggtccattttacagagagccgattggtctgtttttacagagtgttgattggtccgttttgacagggtgctgattggtgtgtttacaacccctgagctagatacgtaagttccccacatccccactagattagctagatatagagtgttgattggtgcattcacaaaccctgagctagacacagggtgctgattggtgtgtttacaaaccttgagctagatacagagtgctgattggtgtatttacaatcccttagctagacataaagggcctccaagtcagcaccagactcaggagcccagctggcttcaccaggtggatgccacactggggctgcaggtggagctgcctgccagtcccgtgccgtgcgccctcactcctcagcccttgggcggtggaagggactgggcgccatggagcaggggcggcactcgtccgggaggctcgggccgcgcaggagcccatagcggggaggtggggaggctcaggcatggcaggctgcaggtcccgagccctgccccgcggggaggcagctaaagcccggtgagaaatcaagtgcagcagctgctggcccaggtgctaagcccctcactacccgggctggcggggctgcccggcagctctgagtgcggggtccaccgagccgacgcccacccagaactagcgctggcccgcaagcgccctgtgcagctccggttccctcccgttcctctccctccacacctccccgcaagctgagggagccggctccagccttggccagcccagaaaggggctcccacagtgcagcggcgggctgaagggctcctcaagcgctgccagagtgggtgccaaggccgaggaggcacagagagcgagcgagggctgcgagggctgccagcacgctgtcacttctcaatcttacacagcctaaattctagtgggagactccagacagtgcatgagtgtagaaggatgtaagattttctgtcgaggtgtgtggatgtgtgaagtcctaggtcatgaagcaggaagccccagctccccatttgaattctagattccatccagagttggttccagttgctccctctgccactccctgaaaactcactcttgctttcagatttgagggccacttccacctcactaggccttaactaaagacctttgcacagatctcatgggtaaggaaagtttacccaatcccaggcgctaattcaaagaggggaggtggtggaggtttattcggccttcaggaagtgttttcaggggacacagttctgggggtgcagggatgactcatatggggctcttgacctcagttagcttataatcttgtgcaggagataagtgggtagaggaaagtatagaaatttccacggcagtgagccgcagctgtgttttgcatggtctccataatttcttttcttttcttttcttttttttttttttttgacatgagtctccctctgtcgcccaggctggagtgcagtgtgcagtggcgcgatgtcagccactgaacggaaaactgtgggcgacgcaatctgtgatcatctctgggggtctgcataaagctcatgaccactgatgtgcgaaaagtgcttttttttttttttttgagacagggtcttactcagtcgctgaggctggagtgcagtggtgcaatcacggctcactgcaatttctgcctctgggattcaagcgattctcctgcctcaacctcccaagtagttgggactgcaggtgcacggtaccacgcctggctaatttttgtatttttagtagagacggggtttcaccgtgttggccaggctagtcttgaactcctggcctcaagtgatccgcccacctcggcctcccaaagtgctgggattacaggtgtgagccactgcacctggccaaataatgctttctgagtaacacgcttgcatgaaggagcagtcaggcaagatcccaccccagtgcccaccacatttgtaaaacaagaaaatcgaactagctgggtactttgccctatgtttttcatcatatgttacattttgaatctttttcatgtttgaaaaatgatctacgatgtgccctttctgttatatcttttattggcttttttttttttgagatgaattctaattgatctcagaaaaaaaaaaaaaagcacgcactttttatataccagttgtcatgggctttttgcaggcccccagagatcatcacagattgcgtttcccatgggtctcattcctgcctgagacactgcctttctctgggtacctataaacctggagagtgacatggtgggggtgtggtgcatatattcatatatatgtttacatgtgtgcatgtggaaacactccgtctcttatgccatggttcagacccacaatagcagtcccagcagggagccctccgaccctgcccaaggcatctgtacggttgacacccttgtgctttgcttctccagacagctcagcagctcctcctcctatagtggggacatcagcaggcaccacaacagcaccgcagaactgcagaaagctgaggccaagaaggaggagacctggaagctgatggaggctgacaaggcgcagacagggcaggtgagattcgctccttaagtgatgatagtggctggagtttatagagcgcccactgtgcactgggcactgtgcaaagtgccttgtctatgttaactcacctgtccatcacaacacacctgtgaagatactatttgcagcaccagaaactgaggccagagaggctaagtgacttactcagggtcacccctggtcagcggcagaactgggatttgaaccctggccaactccagggttagtacttgtagtctctgctctattgactgcctgagcagctcaggggggtctcattcgctagaggtgagctggatgctttaaatcagggcttcctgcaacgtggggttcagttgtgcatgagatggtgtccggttgtgcacagacgcattaaatgacagaggaatgtttgtttcatttctttttttaatttttatttttttgagatggagtctcactctgtcaccaaggctggagtgcagtggtgcgatctcggctcactacaacctctgcctcctgggttcaagcagttttcctgcctcagcctcctgagtagctgggattacagaaacttgctaccttgcccagctaatttttgtatttttagtagagacagggtttcaccatgttggccaggctggtcttgaactcctgacctcaggtgatccacccaccttggcctcccaaaatgctgggattacaggggtgagcaccgcgtcctgcctgtttttcatttctcatttggtcctaatgattacgtccctgagaaagtcccagttgggtcctaccctgccttctcaacctatcaaccactatcctctctttgtaacaaggagaccgggttttgagctcctgttttattgtttttaaagatcgtctattttggacaagtgttaataattctccatttatggtggtgatccaaagtttatttttaaaaataaatgtggttttttttgtttttgtttttaaagggaatggaatttttaaagtaggtaaaaaataagcatgcagataaagaaaaacaaaaaaaaaaacatgaaaggtggtagccggggagtggggctggggcactttctcttagatctgcccggatgtgtccagagcttccgaggactgtctgttcctggcttcttccttaacttgtcatcagagtcaggaccataacaaggggcagaggtgactctggtgtcctctctcgccttacccttagtgaccctccaggaagccagagaagttaccccaaatcgcaggacatgggaaggaagggccagagatgccaggcccatttaatcctcatttaactccaattttatattcaaggaacatcaaagccagggggcttgttacttgtcaaagttggacccagagtggagccaggcacaacacgcttatcgtttgtgtctttttttttttttttgagacgaagtcctgctgtgttgcccaggctgtagtgccgtggcgctcaccgcaacctccgcctcccgggttcaagcaatttacctgcctcagcctcccgagtagctgggactacaggcctgcgccaccatgcctagctaatttttgttattttcggtagagatggcgtttcactatgttggccaggctggtctcaaactcctgaccttgtgatctgcctgcctcagcctcccaaagagctggtgctgggattataggcatgagccactgcgcccggccttttttttttttttaatttgttttcttttttttttttctgagacaaggtctgactctgtcacccaggatggagtgcagtggcacaatcatggctaactgcagcctccacctcccggattcaagtgattctcccacctcagccttccaagtagctgtgactacatgtgtgcacccccacgcttgactaatttttttaatttttttgtggagatgaggtttcgccctgtcgcccagactggtcttgagctcctgggctcaagtgactggcccgcctcccaaagtactgggattacagatgtgagccaccacacctggccacacacttgtcatttctgacccccgagcccaccacattccactactcatgagaaagaggttcctgaacgctgcaggctaatttcagggacagcaggcaacttggccgcatgacaaagccaagtggtgaaataaacacattcttaattatgacctgtctcctcacccacatttttcattttccagaatggggacttgaaaactcaaaaggaagcagccagttacacatcagacctgttatctttcacctgttacctttcagctagaccgtagggtcagatgatttttgtttttttttctggtgaggggcagagcctcactgtgtcgctcaggctggagtgcagtggtgtgaccaacgctcactgcagccttaagcttctgggttcaagagctcctcctagctcagcttcctgagtagctgggactataggtgtggaccaccacacctagctaattttaaaattttttgtagagacagggtcttactgtgtttcccaggctggtctcaaactcctgggctcaagtcattgtcctgccttggcctcccaaagtgctggcattataggtgtgagccaccgcacccagtccagatgattttcatgacccaaaattcagcatgaaaagcttgaaatgacaatgagcacagacacgggtaaagatccctggaatttcttgaaaccaagtcaggtggtttaggtgggggctggcctaaagcagattgccctgtctctcatgtcaggcggctagacacatttgtttagccccatgctgggctccacagggaatataggagggaaagaaactccaaccttcacctcctggagcgaactgggcactgggaagatgggtgagatggtattctgtgctcagagtgaaaagagttggaggaggctggcccagttgtggtgttgaggtgacatttggccttggttgccaggcaacatgtcacacgttgcttaaaactcattggtggcttctgctttctgtcagtcttggctaaaagttggaatcctgacccgagtctcccatgccatgtgtggtctgactgcgaccggtttttccagcctcttgttccttgctgccccatgatctcctggctccagccaccagtgccttctctcagttccccagatgcactgtgttccctcctacctcagggcctttgcacatgctggttctgccaccttttttccattttcagctggtttaactcctttttttttttttccccctggaggcagtgtctccctctgtcacccaggctggtgtgcagtaagtttggcttggtgcaacctccacctcctggcttcaagcgacccttgtgcctcagcctacaggcatgtgcccccacgcctgactaatttttgtattttttgtagaggtgagatttcatcatgttggccaggctggtctcggattcctgacctcaggtgatccacttgccgcagcccctcaaagtgctgggattacaggtgtgtgagccacgatgcccagcactctttatttttttttattttttagagacagtctcactctgtcacccacgctggagtgcagtggcgcattctcggctcactgtaacctccgcctactgggttcaagccattctcttgcctcagcctcccgagtagctgagatgacatgtgcctaccaccatgcccagctaatttttgtattttagtaggcaaggggtttcgccatgttagtcaggctggtctcaaactcctgacctcaggtaatccacccgcctcggcctaccgacgtgctgggatcacaggcatgagccactgcacccagccttggtttaactctttaatgtcacttcctcgaagaaaacctcccccaatacctctctagactgcattaggtcaggttgtctgattttatactcacgtggaattgtgcaccgtttacagcccttctctgtgatgacgcatttatctgggatgattttatgggagcctatctcaccacgcgactggaagctccatgcatgagggcagagaccctgagtttgtctcttttttttgagacggagtctcactctgtcgcccaggctggagtgcagtggggcaatcttggctcactgcttctacctctgcctcctgggttcgaggaattctgcctcggccttccaattagctgggattacagatgccgaccacacacccggctaactttatatttttaatagaggcaggattttgccatattggccaggctggtctcgaagtctctacctcagttgatctgcccgcctcagcctcccaaaatgttgggattacaggtgtgagccacggcgcctggccctcgactttgtttactgctgactttgttgaatagctaaaggggaggggtgttctacgtaggagcaaaggcaggcagctgggtggcacagtgctggtgaagcccccgaccttgtggggctggggctggggctgggtgcgtgcatgtgctaagctgccttatctcctgtgatctccaggtcaagctttccgtgtactgggactacatgaaggccatcggactcttcatctccttcctcagcatcttccttttcatgtgtaaccatgtgtccgcgctggcttccaactattggctcagcctctggactgatgaccccatcgtcaacgggactcaggagcacacgaaagtccggctgagcgtctatggagccctgggcatttcacaaggttggtgccactgtctcccaccccgcctgatttgggcccctgttgtggctttgtctaattatagaaatggatccttagagtcctcagcgttttgtgggaccccaaaccaagccaaacccagaaaaatggtagctgtcagctagtagacactcagatatttgtagagtgggtgtttgagtgctttgttcatatgggccttggtggtagacgggaggagtgctccagtgtgcccattttacagatgaggacagttgagaacagaggcctctggaagcactgagggttgggaggacccccttgagcatgtttgctttgtcacagtgacagagcttccatgaggtctcatttgcggacttttgcctgctgagtgagggcggaaattggcttatactagtaattcccaattatgggcagtgttgtccctcggggatgtttgacaatatctggagatgcttttggttgtcaaaagattgagaaaccctgctgttggccaggcatggtggctcacacctgtaatcccacactttgggaggctgaagtcaaaggattgcttgaggccagatattcgagaccagcctgggcaacatagtgagaccctatttctagaaaaaatagataaataaaataaactacaggtcacgtggtggtatgcgcttgtggtctcagctacttgggcagctgaggtcacaagattgcttgagcccaggagtttgagcctacagttagacctgtgattgcaccactgccctccagcctgggtgacagagcaagaccctgtctcaaaaaataaacaaaaaaaaaaaaaccctgctctatactgttctgtgtggtcctatgggagtcctcaaatgcagcagcgttgatattaacagctggcatttactgagcatttacttggtgcttggatttgttctaaacacttccacgtgttttaacttattttatccttgcagcagtcctgtgaggtaggagttaatatttccctcattttggagatacagaaattgaggcccagagaggttgagtcagttgccaaaagtcacacagctaatacatggcagcattggcattgaacaaggcagtctggctcaggagctcacgctgttatccactgtgctacgcagtatgtgagccatgtttgcaaatacacatgtatggtccatatgatatatacacagtaaatggatagtcttgacacatttgagtacttctgtatgccaggcacattgccaggtggggacttcacattccacagtgctccgaggtcagcgtcattgtcccattttacagatgaggaaactgagagattcagtgaccagtaggaggtcccatagctggtaagtggcagagatgggatttggcagcattggctccagagcctgttacttgagcccctgcctattgggtgtcttcccgattaaagaggccgagatggaagcctctctgttcctaggaagttgctgctctggaacacacagtgcgctcctgtggattgtttgagagaagcaccagtgtctcaggatctccaggaggtggctttgggaaaacccagcggtagcagagcacacatggactccttgagtctctcaatccctcccctcccctctccttgccattaggggaaaggactgtggcctacaaattataattgagggaaggtagagaacagagagggtgtggtattacctgaactcacacagcaacaacgtctgttccagagctgtgctgtctggtgcggtagtcacaagacacaggtggctattttaatttcagctgttaaaattaaataaacgttgggcgcagtagctcacgcctgtaaccccaacactttgagaggccaaggcgggtggatcgcttaatccaggggttcaagaccagcctgggcagcatggcaaaaccctgtttctacaaaaaatacaaaaattcgctgggcgtggtggcgcatgtctgtaatccctgctactcaggaggctgaggtgggaggattgcttgagcccaggaggtcgaggctgcagtgagccgtgatcacagccctgtactccatcctgggtgacaggatgagagagaccccatctcaaaagaaaaataaaattaaagatttattcgattagactagacacgtttcaagtgctcagtagccatcatttcagaaaattatctcagcactgttctaaaacagcgatccctagcctttttggcaccagggactggtttcatggaaatggtgggtggtgatttcgggatgaaactgttccaccttagatcatcaggcattagttagattatcagaagaagcgcacagtctaggtcccttgcatgcacggttcacaatagggttcgcactgctaggaggatctaatgccaccactgagctcacaggaggcagagctcaggcgctgatgctcaggaggtgaccaccactcacctcctgctgtggggcctggttcctaaccggtcatgagctgctgccaatctgtggccccggggttggggacccctggtctagaagaatatggcatggggattaagagcaggctgtctggattaaaatcccagttctgcttctgctaggcacagtatactaagggcaaaggcgttcacctatctggacttcagttttcttatctgtaagttgggtagtaatagaagttattcagagtcatcataaaaatcagttacatgtaaaacccagcacagtgcttagcacataggaagtaccctctgaataatagctgccattatcatcatcattattattactatttttttttttttgagacggagtctcattctgtcgcccatgttggagtggagtggacgcagtcttggctcactgcaacctccacctcccggattcaagcaattcccttgcctcagcctcccgagtagctgggattacaggcgccaaccaccacgcctggctaatttttgtatttttaggagagacggagtttcactgtgttggccaggctggtctcgatctcctgacctcaagtgatccacccacctcggcctcccaaagtgctgggattacaggtgtgagccaccatgcctggttcatcattattattattattagaagttgggagtccaggcctgcctcgtccacatggccactcctccctgcagtgcctggtcagctccctctctgcattgtggagttttaactccgagtgtctgcagggatcgccgtgtttggctactccatggccgtgtccatcggggggatcttggcttcccgctgtctgcacgtggacctgctgcacagcatcctgcggtcacccatgagcttctttgagcggacccccagtgggaacctggtgaaccgcttctccaaggagctggacacagtggactccatgatcccggaggtcatcaagatgttcatgggctccctgttcaacgtcattggtgcctgcatcgttatcctgctggccacgcccatcgccgccatcatcatcccgccccttggcctcatctacttcttcgtccaggtaaggggtgaggtcttagtgttcgggacaagccctactgtgcattatataccagtgttacctaaagccttgttttatcttaccatgtccccagtgtggtgcttttgaagcatgtagatttgtttttgtcagtttcgaatacctaaattgtttttttgctcacaataacaaaatgcactttttttgtggaatgcagttttttcctaagttttacttttccacctgtcaattcaaaaaggaaacaaaacctatcactataaagacaacttcattattaaaatttctttttttttcttgagacagagtctcgctctgtcacccaggctggagtgcagtggcacaatcttggcttactgcaacctccacctcccagttcaagtgattcccctgcctcagcctcctgagttaacaggtgcgcaccaccacggccggctaatttttgtatttttagtagagacagggtttcaccagtgttggccaggctggtctcaaactcctgagctcaggtgatccacccacctcgacctccccaagtgttgggattacagatgtgagccactgcgtccagcctaaaatttcttcaagtataaaattctttagttcttaagcctcctgcaggaggcaggaactaaacaaaaaacatgactaatagcagcctaaataagatagacgttttctttttctctgtcataatagaaatttagaggtaggctgttcagggctggtatggcagcttcatgagtttaatatcccagatacctgcttttatttaaaaatttaaaaaatcttaccatatttatacaagcctttcattctttctttctttcttttttttttttaatttgacatggagtctcgctctgtcgcccaggctggagtgcagtggcgcgatctcggctcactgcaagctccacctctcgggttcacaccattctcctgcctcagcctcccgagtagctgggactacaggcgcccgccactacgcccggctaattttttttgtattttcagtagagacaaggtttcaccatgttagccaggatggtctcaatctcctgacctcgtgattcgcctgcctcagcctcccaaagtgctgggattacaggcgtgagccactgcgcccggcccctttcattcttaagttggcctcatggtccaaggtggctgctggagctccagccattatatctatatttcagtcagtgagatcaaggaagggaagtagggcaagggagcatatgggtgctgaatcagcactactcccttatctgcaggcacacattctaagactcccccaatggatgccttaaactgcagatagtattgaatcctacatatcctgtttttttctgtacatacatacctatgataaagtttaatttataaatttggcataatagattaatagcagtaatttataataataaaatagaacaattataacaatatgccagtatcactacttctccacattagaggcgttatttttattacttttttttttgagacagagtttagctgtgtccttcaggctggagtgcagtgatggaatctcggctcactgcaacatctgcctcccgggttcaagtgattctcttgcctcagcctcccaagtagctgggattacaggcatgcgccacacccagctagtttttgtatttttagtagagacgaggtttcaccatgttggccaggctagtctcaaactcctgacgtcaagtgatccgcccgcctcagcctgccaaagtgctgggattacaggcattgacccactgagcccagccaggggcattattgagtaaattcggattacttacccataagcactgcagtacaatggccgtcagtctgataaccgatatggctattaagtgactaaactgacagggagggtctgcagcatggacctgctggacaaagggatgattcacaccgcggatgggactgggggggatttcatcacactactcagaagggtgcacaatttaaaacttacacattatttttggaccacagttgaccatggataaccgaaaccatgtgtgttagtttgtcctcatactgctatgaagaaatacccaatactgggtaatttattaaggaaagaggtttaattgactcacagttccgcatggctgaggaggccatggcagaaggagaagcaaacatgtccttcttcacatggcagtaggaagaagaatgagagcaccacgaagtcggggagcccccttataaaaccatcagatcttgtgagaactaactcactatcatgagggttgggggaaactgcccccacgattcagttatctccacctggtccctcccatgacacatggggattaagggaactacaattcaagatgaaatttgggtggggacacagccaaaccatataaccacggaaagtgcaaccttggattagagggacacctgtacatctaattgtccagaacttagtcatgggaccacctctattcacaagggaccctggaaagtgccgtgttttagctgggcacattgcacttcccagcaaaaactttcagttgggcctaggcacggtggctcacgcctgtaaccctacccctttgggaggccgaggcgcgtgtatcacctgaagtcaggagttcgagagcagcctgaccaatatggtgaaaccccacctctactaaaaatacaaaaattagccaggtgtggtggcatgtgcctatagtcccagctgctctgaaggctgagacaggagaattgcttgaacctgggaggtggaggttgcagtgagccaagattgcatcactgcagtccagcctgggcaacagagtgatactctgtctaaaaaaaaacagagaagtttctgttgggaaaggagaaattgtgtaggcagtcagtcgtctctgctgcatcccttctgcagaaacggttatatgttctttgttctttgaacacatgtggtttcttaggatatcgcaggatagataatgttttcaattgacaggtggagcatcttgctaagtgggagagctgagagtgcaacctcaagtctgtccaattccaaaactgctgttaccgctaaaggattaaccgcagcacaattgccagtagggatgggttgtttagatgggagcattccagctgcaaagcaaaacaagagtaagaaaccatgaggctcaccatatctcaaaccacgctgcacagctgttcaggtggcatccagggggccttggttcaatcatgtggcccctgcgccccaccacactgtggcccaatgattgatgagaacgaacagtgatggaatcagagagagtaggtccagttcctggagtctcgttatatcctcttgaaattggtgccagctttttttttttttttttttttccctgcatttaccaaatatgttatctgtgttcatacgcaagctggaaaatttcctgaaagacccaaaaagaacaaaacaggccaaatgcagtgttgaaggcaacttaaatgtctgccaatagcaggaccttgggtacaccgtggagcaatgtggctttgagcagggataattagaagacgcagctgttggagcaccaaggatttttatttttcaacaacaaaggaaatgattttagcaaaggaccaagttctaggtgcactgtcgttatcaccgagatgaaatgcataatgtgtgtgggcaggactggaagggaggcagatacatgaaaacatcgtctttttaagggttgagattatagaatagttaattttttaatggcttttggctaaatttacatttatcctctcactaggcagtctcattcctaagtgtatattaaaaaaaaaaaaaaaaaaaaaagagcaaaggcagtgcttagaatgttctcagcatcttgattcataatcgcccaaactggaaacagctcaaatgtccattaacaggaccgtggagaaataaattgtgatataattatacaatttatggttgagtagtaaaaaggaatgaaatgctaatacacaacaatttgggtttatctcagagatgttatagtgatcaaaagaagccagacgaaaaagagtaggtactgtgagatttcatttatatgaagttcggtcgggtgcagtggctcatgcctttaatcccagccctttgggaggcctagacaggaggattgcttgggcccaggagttcgagaccagcctgagcaacatgggaaaacctggtctctacagaaaatacaaaaattagctgggtgtggtggcgtgaacctgtagtcccacctgcttgggaggctgagatggaagggtcacttgagcctcggaggcggaggttgcagtgagctgacattgtgccagtgcacttcagccttggtgacagggcgagttgtctgaaaaaaacatcagatcagcagggcaggtggatcacctgaggtcaggagtttgagaccagcctggccaacatggtgaaaccccatctctactaaaaatagaaaaattagccaggcacggtggtgggcgcctgcaattccagctacttaggaggctaaggcaggagaattgcttgaacctgggaggcagaggttgcaatgagccaagattgtgccactgcactccagccagggtgacagagcgagactgtcttaaaaaataaaataagatcattcctgaacaaatattcatctcaggttagatttttccagtaagtaaggttcagaggcagtggcaagtggaggaaagtgaacaggtaacacacttgagagcgatttgcatctggattgttcagaaagcaagctggtaagagaggaaggagatgtggtccagggtaagatggggcagatcacctgggccttcagccatgcagaggggtctggatttcatgggaggcggtgggaacagctggagaagaaattatatctgatccacattccaggaattggcagaacagctattctgagactgcgtggggttgtgcggtacctgggttcacttacatagcttctggggccccagaagactctccatctgtgggttgcaattaacgcccgtgccgccacccagaaagaagctgccaaccacagaggccttgtaaaagccacctgctgctattgatgctttttgttggactctgccccaaagcagcccagtacacctggcccagggcaggatgcagggaggccgagttcctagcaaccctttgttagttttcccagctctcctgtcgataagcaattgtaggcaccttgtggaatcaggaaccccgggctcaccagttccttttgcgtagatgagaaaaacctaggctaggagagcgcagtgtcctcacatggctggtgcagcctctgatccacagctccacaaagcttgcagaaggtggttggcttttgttctgaatctaacaagacttatcgggaggctcttggtgcctggcactggctgaatgcccaggttgggggaggcagagcagatgaagcatctgcccgcgagggtgggtggagctgcttgtgaaacgtatcatcgtagcccgggagctgggacactgaagcccggagaaggtgctcatggaggatgggaagggcttcccgaggaagtgacatctgtgctcccatctgctgggtgatgaggaatggcctggacgggatgggcatggtgggtggaggcaggcggcctgtgtgcagggaaggaaggggagagttacaggatgagatgagttgagggaagaagcatggttggcaactctaacagcgctgggaggccatcggaggggggtgacgagattgaccctatcctcatgggcatctcagctgggctgagtgtgctggaaccggccattgcatggacacagtcactcctgaggggatgtgatcaacaggcggaattctgtcacttaatgataacaatagtcaccagctaactgaatgcttactgttaggtcaaactatatgaaactgctaatacttatttcttatctacagaaacagctatttcctgtggttcaacctagtattaccaggcactgtgcttagtgacatcatgcatatctatatgatttatgaaataatgtgtccacgcaaatacacatcacatgtaagactgtaactcttacatgtcaccctcacaatgaccccgtgaagcaagctttgttttgtttcgtttgttttcttaataatattttatttttgtagagatggcattttgccatgtgcctgggctggtctcagactcctggcctcaagtgatctcccgcctctgcctcctgaagtgcgggtattacaagcatgagccaccccacctggccgagcaagccttgttgttcccattttacagataaggaaactgaggcttagagaagtaaagtgttagtcgtgtttatattgccagtcagtagttgagtcaggatttgaactgaggtctcgttgacctcaaagcctatgctgaaaaccacactgctggttccagaaaaccctagaggtgaaaggcttcagagaggcagtacagggtagaggttagcactttgcagcccagatggcctgggtttgaatcccagttctgccccttgctagccatgtgaccttggggaggagattaactagcttctttgtgccttagtctacccatcacatataggaatgagcacctcaggttttttgtgaggattgaatgaactgatgtttgtaaaactgcttagaacgatgcctggggctgtgggctttgtataagcgtgagctattattgtcactgtccttgtcattggtggtgctattcctgtggttcaccaggtgagtgggcacccctgtgagggcagcccggctctaacattttgcctcctggaggtatcggttacgtctagatgttctccagcacagccctgccctgggaggatggcaggagggaaccttcatcaactccccgcgtctgttctctaccccagaggttctacgtggcttcctcccggcagctgaagcgcctcgagtcggtcagccgctccccggtctattcccatttcaacgagaccttgctgggggtcagcgtcattcgagccttcgaggagcaggagcgcttcatccaccagagtgacctgaaggtggacgagaaccagaaggcctattaccccagcatcgtggccaacaggtgggcatggtgggcctgcaggagcgggtggaggaggccgccttagcaccttgtctctttgcctcgatcttttcctcgcaccttgagctgggtataaagccaaaccccggccttgcagaaaggatggagaggcttgatgagcgcggaggacagatgaatcattaagagcagacagcggcactgtagacatgcagtgcccgcggcatttaagtgcagggacacagctcttctggagtcagaaagccctgcaagtgcttcccgttaactgtcatcctagtgatgcaagactgccagcgaccgactctgctattgagtatcttcataccgctgttcccgtctgggggtgatcatgcacccctgggtgatgtgtgtcagaagcaatttactaatactaagctaaaccatatgagattgtcatcttgtgggccagatgtcatggctcacgcctgtaatcccagtactttgggaggctgaggcaggaggatccattagattccaggccagcctgggcaacatagcaagacccccatctctcttaaaaaaaaaaaaaaaaaaaaaaagtagcccatcatggtggtgtgtgcctgtagtcctagcttctcgagaggctgaggctggaggatcgtttcagcccaggagttcaaagttgcattgagctatgattacaccactgcactccagcctgggtgacagagtgagaccctgtctctggaaaaacaaaaaaaggagatgggggtgggagattgacatcttgtggatcacagataatagcatcaatccaaaagaggcagaagtttgctaattatttgctgaatttagagaagtgtccctctcacccatttgcatccttatagacttttctgaaaaagtgacagcaccccagaggtgtcccataaccattagcccgtcttacacactctaatcccatagcgtaagtctgggtgggctaaccctgaatgattacagaccttgacttcccttcagaatttttagggagtttgtcacaatctggctgtgtctgtcggagtagtgaggatcagtcacttggttcataagggctgcaatggagaaaagatcaacaccccatcttcctagaatgctttatattttagaacattaaaataatagttctagtgctatatgatatcatacgaagcctagctttaaacaaataagatggccaggcgcggtggctcacatctgtaatcccagcactttgggatgccaaagtgggtggatcacctgaggtcaggagttcaagaccagcctggtcaacatggcaaaatcccatctatattaaaaatacaaaaaaattagccgggcatgatggtgggtgcctgtacttgggaggctgaggcaggagaatcacttgaacccaagaggcagaggttgcagtgagccaagaccgcaccattgcactccagcctgggcaacgagagcgaaactctatctgaagaaataatagaagagaagagaagaataaaataaaaagtaaaataaaatagttctgatggtacatgataccatactaaacctagctttaaacaaataagatgaccaggcacattggttgacacctgtaatctcagcactttgggtggccaaggcaggcgggtcacttgagcccagcagttcgagaccagcctgggcactctagggagaccctgtctctaaaaacaaaacaaaaaaccaaaaatttgccaggtgtggtggcatgggcctgtagtcgcagctactcaggctgaggcaggaggatcactggaacttggaaggttgaggcggcagtgagctgtgatcatgtcatccacactccagcctggatggcagagtaagaccccatctcaaaaaaacaaaatgacagaaaacatgatttctgtttctattttaaagggtaaaatagtatattttaacactttgaaatgaagagtctgggcttgggaacgttacaatgatgtttactcgtactagttacgcactcccctcccagatctgtctcgtaacaagagactgttattttctacttgtttttagccaaaaggccgagaaacgatggttattttaaatccctagtgtctcttacagttgatgtcttcttagtatttaggaatttccaggacatctttttgttgttgttaatgcactgtgtgtgtgtgtgtgtgtgtgtgtgtatgtgtgtgtgtgattataggagtgacccactacgcccggctgtgtgtgtgtgtgtgtgtgtgtgtgtgggtgtgtgtgtatgtgtgtgtgtgtgattataggagtgacccactacgcccggcctatgtgtatgtattttaaaggcttcaatgagaaaaaagttggttcttaaaaaggcaagctt

SEQ ID NO: 666 - DNA, 364 bp, Homo sapiens
tggccatgtccctgtggtagggggctgcatctctggcagaccccacaacggcttcacctccttgtgttccaggcagccggtgaaggttgtgtactcctccaaggatcctgcccagccgaaagagagttccaaggtggatgcgaatgaggaggtggaggctttgatcgtcaagtccccacagaaggagtggaacccctctctgtttaaggtgttatacaagacctttgggccctacttcctcatgagcttcttcttcaaggccatccacgacctgatgatgttttccgggccgcagatcttaaagtaagacccctttcctcccaggtgggctccattttccctccttggctttgatctttcagtt

SEQ ID NO: 667 - DNA, 351 bp, Homo sapiens
ccaacactgaagctctcttccctgcccccacgtgtcacaagtcattccaggccctctctttgctcctttgcaggttgctcatcaagttcgtgaatgacacgaaggccccagactggcagggctacttctacaccgtgctgctgtttgtcactgcctgcctgcagaccctcgtgctgcaccagtacttccacatctgcttcgtcagtggcatgaggatcaagaccgctgtcattggggctgtctatcggaaggtaggggacgctgtgccattggcatgtggcccgacttccacatcccctcctgcagccctgggttactctggggccagcgtggggatttccagcccagctt

SEQ ID NO: 668 - DNA, 208648 bp, Homo sapiens; identical to SEQ ID NO: 663
  misc_feature (1)..(208648): n=a, c, g or t

SEQ ID NO: 669 - DNA, 189013 bp, Homo sapiens
gaattcctaggctcaagcactcctcttgtttcagcctctcaaattgttgtgaccacagtcatgagccaccacacctggccatctgttttttataaattatctggtctgtggtattttgttataacagcctgaacagactagactatcctctacgggatgggccacataaacatgatttttatgcttctgtattgagagcaggtatgtctgtatatccatatctatatctatatttataactatatctgtcaccagaatagggagggcataggaaggctgagtcacttcccaaaagtccacccactgtgtgcaagagaactcaaaccccaatcctctgatgcccaattcagagaatggccccacctctcacacttaccaggcatatggcatagcctctgccttcttcccagtcccgctgcacctgcaagtgtggttattacctcaattgcctcagctctatgcacacccccacgggtggcaggtatgattgccacctccgttttacagatggagtcagtgaggctcagggaggttaaaaacttgactcaagttcacacactggggactgaaatccaggattgttctactctgctgtccatccacagtttctcagccttggcactacggacattttgagctagagaattctctgttgtgaggggggtcctaagccttgtagggtgtttagcaacatccctggcctttatccactaaataccagtagcgctgcctctcaagttgtgacaaccagaaatgtctccaggtgcttcttaatgtcccctgagatgcagaattgcccccagttgagaatcatcactccagaattgggcccaccatccctcttctgtctcatctctagtaactaggtttctcatggttctgagatttatcacaccctctcctgcccacatttgcccttccacatcctgctctctgggcaaggcaacccacataataccatctttcttcaaatgtgttagtgttgatgacttaaatatactcagcaaacttcccactgtttgctcctgcctctcaccatggatgtcttcaaatagctcatccttctggaagatttccttatcttcaattcgattatttagctgataaccctactgtcactcccaagcccactcaagtttccatgcctccccacccactggttactactgctctctccctgtcatccctcatggagtccagcacagtgctgaatcatcaacctagccacaggagtcttgtagtcagatcctatcacccctccccttaaaccactttggttggcggccaggcgcggtgggtcatgcctgtaatcccagcactttgggaggccaaggcaggcggatcacgagatcaggagatcaagaccatcctgattaacacggtgaaaccctgtctctactaaaaatacaaaaattagccgggtatggtggtgggcgcctgtagtcccagctactcaggaggctgaggcaggagaatggcgggtgaacccaggaggcgaggcttgcagtgagcctagatcgcgccactgcactccagcctgggcgacagagcaagactccgtctcaaaaaacaaaacaaaacaaaaaaaaacgctctggttggcttccattgcagttagaataaaatccaaactccttcctgcagcctacaaagtcttgcctgggcaaagctctgcctacttctcggacctcatctcctacctgcccctgctagctcactgtatcgcagtccatgcacctactgcgtgttgactggacacacccaacctgttcttactcccacatcttggccttggtaggatccgtccccagagtacgttttctctcgattctcttttaatggctcctgcatgtcacagaattaaatatcatctctgcagagaggcctcacccaatcaccagtacaaagtagcccgtggcaggtctctattgcaccacctgcttgcttttttcttgggcaccgattatgaacctctgtcctcttgtttgcgtgtttattgtctgcccatccaccccactcacaagcagaactaaccttcccaggaacagagatctcacctggtttgctcacctgtgcatccccagtatctagaccagcactagttaagagtcgaagttcaaaaaatacatgttgaatgagcctgtcaggtcagttagcacgcagatttcattaaacagaggtaacttaggaattcaaattattatgcataaataaagcacacaactacatatttggctctccctgtccagttcctttccaactcatgaaacacagcatgaataatatattctgattttttttgattgaactgtcagcatgatttatttcatagcatcttcttctctctcccttttgtaaataatggtgcgtctgcagagctttttgctaacatttttcttgctaatttgtctggggggtgggaggatgatggcattttttttttaccctcttataatgggttcggaggacacttttttctgcatagcgttgggactctaaaaaatcaaggttatacagtgcattgattactcgctgttttacaaaccggctcagactcatttcacaacttgagaataattctaattggaaatcacctcctttaaaaccatcagattaatggtattcccattacacttcctgcccaaccatgtgaacaatagagcctgaactgcaactgctagaattgtgcatcaaagtaaataatgcactaacgagacagcaatttcattcctcctgtggaattccccaggcatttctccttcaagaggccaggatgggttcaaggcaaatccctctggaccgtgcagggtgactggaatgaatgtggacccctgagtatggaagatggtgcttgtaggatgtgatacgcattcttcaatcattgtagtatttttgaactctcatagacaaccagtacggggatgaggagacatcaataattgctgatgggcttgttagactctctggcactaatattatgtgaggtgtataacacataatatatttatgtatcaagattaaaaaaatggagcgtcacttcctacccaccctccctcctcttctttctcagctcccacatctcatcaaacacaattgtcaattttagctcctaaaatattgttgttttgaatcttgtcctttctcttcatccagaattcatttccccagcactagcctcctggatgctatttctgcccctacaccagtagcgtgattcctggcagtatattaggattgtccgatgagcttttaaaatataccggtgtccagactgcgcttccagagtgcctgattcaattggtccagggtgaggtcctggcactggatttttaaaaattgctccctggtgagtctcctgcgcagccagagttggcagccagcactggctttgcgtagcaaacagcagggtctatgataaagcccgcctgactgtgccatccccggcttagaaaccaagactgcttctgggtgccttcagcgtggagtgcaaggtccctagtgacctgacactagctggcctctggagccccattgctcctcttccttctcatgctttgtatagtccagcagaatggctgcttgtctttcttgaggacagcctgcttgttcacacctcatgcctttgcacactgctgctttgcacctgcaatgccctttctccctgaaaccgcacgcaagtggtgtttaatttttcaaaacctgctttagattttgcttcttctaagtccctcctgagttccatctctcctctgtgctcttatagttttgttgcatatcggccacaggttattgtaattgactcaaatttgtacgagttttcttgttaaaccttgaacgccttgaaagccagggctacatcttattgatccctatgaccccagcactaaacactgtgctaggtacacagcaaaggctctataaatgcatatgattatgtcccaaatggcggtcccagaagatgtgctcattcctttgccctcaagtcatagtccctttaaagtttccaaaatatagttccataaagatgcgtggaggcagacagtccacgaaaagtgaaattgaattacagtattgttgtgaaatgaaaaaaaaaaaaaaaaaggcacgtagccctggattgaaatcctgcgtctactacttactagctgtgtggcctcagacaagttactgaacatctctgagccagagtttcctcatctgtaaaactgacaatcatatctaatttataggacgggaataaagattaaaagacagaatgttagcaatgtacctaccaagaagtcacatcatagaatgggcaagtgcttaataaaagataaatcagggtcccttatccttacttcgttgcccagtttgtttgttttctttttgaggcagagtctcactttgttgcccaggctggagtgcagtggcgtgatcttggctcacgcaacctctgcctcccgggttcaggagattctcctgcctcagcctcccaagtagctgggattacaggtgcccagcagtatgcctggctaatttttatatttttagtagagatggggtttcaccatgttggtcaggctggtctcgaactcctgacctcaagtgatctgctcactttggccttccaaagtgctgggattacaggcatgagccactgtgcctggcctcgttgcctggttttaatcttcttggaaaaatcagtgattaagaaactacccctaaatagcaatcatcatcataggcaataacagttaagcatcttattatcttcttgccattttgcataggactttgtgtgcgtgatgctactgaattcccagggcagccccatgaggttggcactacttttatacccattttatgactgaaaaaacagaggctttgaaaaaccctagaggcaaaaagggaaagatgggcatctaaaccaggtgggcaaatctctttctggagctcattacactgcctgtcccacccatctcattctatcagctacctttcttctggggctttgttggattgtgtttaggtaacaaagaataataatagaagggccacctgactggttgtcaatatgaaatgaatcaattgttctttgtattttgtcttccctcctccagccaaaccttgagaacaagtctggaaacattttgcatgtactggcaaacaggatggtgaattgacaacacttcttgttagtaattagggcatggtaatgtgctcctttggtaattagtgcattaaggtagcatagattgtatcgcttacagtgattgaaaggtatggcaagctcagaacattattaacatttgaagctggaagctgctgggaggtagtgtagtgtggacactacgagggctggaggggagtcggaggccctgggttcttggcctggctgtgccacttatgtgctgtgtgagcttggacaagtcacttggcctctctggacttcagtttctttgggggtaaaataaagagatccgattctggtgtgtgaagggaagagaaggaagaaaacaggagatgctatcagtaaagaccttggctaaaaaaagagatgaagctgattcatccttgcttccacccctgggaacacaaggactccccagtgggtgatgcgtttaatcagggtaatctaggctgtgctgtaagaacagactaacccagaaatgttagtggtttagcatgacaaaggcttacgtatcactcacgcaaattccaaagctggttaggcaactctataggaccgtcttttaggtgatgactcagaaatgtaagctgctttgatcacatggcttccaggttgctgccacaacaaaagggactgttggagggtcttgcagtggctcatgaacgcattagccagaagtgacacggaagacttctactcacaattgattgggcggtactagtcacacggccccacccaaccttgaaaagagctgggaaatgtggggaaggtacaactctaccagggaaagagagaaagtgagcacttactaagagcttcctatatactcgcaattgattggatggtaccagtcacacagccctactcaccttgaaaggagctggcaaatgtggggaagctacatctctaccagggaaagagagaaaatgagcacttactaagagcttatatgttccatttgttcttcactatctcttctatcattcttattttccacataaagacatcgagtctcaagagcttaagtgtaagtgcagaaatttatactcttaggaatttgctgacctggagttctagcccaagttgctgatctcaaagcccaagccctttgtacctttgcacaatgtttaaatgtagttatagggccctcctagcctggatgatcctgggactgccctcttctttgaaactctgtacctctcatgtccttaaatgaaatcccttgctagaacacaaaacaaaacaaactcaatttccttggtggattcatatattcagtatactgtattatggaggttttgttgattcaaatattttctaattgatgtgaaatactgccttatgaaaattctttgtgctgtcctgtaagattaggggagaaaaaagaaagccacagagcctggatgtcttaatctcatagcagcacacaatgggttaaaactcagggcagaggaagagtttgtgatttttcccggtcacagagagatgagaaataaaatagggtgctctggatccctgtcctttcgtctgtttctcctgggatgggcagtggtatccaaggtgctaaagaaaaaatttcaaggagtgaaagatgtcacagaagactaaatgccatggacagctgtggagatgaagggacccattgaatgtggcaacacagtggctatcggtgacttttgccagagccacttcagtgcagttgtgcaaacaaagacctgatttaaggatgcagaaagaagaggtaaggaagtagatagagatggtgggtgtagcatatgcttttaagagacttggcagcgataagaaacaggaaccatggcaggatcctgaagaagaacaagtaagtgcttaattaaatttgttgattgagtgctttttttggcttagccagtttagttcttagttacttcctgtccattagtttgattgctacttagggaacaggaataggttttgttattggctattttaagtggtaatttatgaaggtcaatctactgaaaaaaagcccatatgtatcatagagtccgctggggattatttggaagttactcactgttttggatgatgcaggacactgccttgaaccattaacacagataattaaatgctggctctaacagatgagaattccattcttttgttaatcattagagtgtgtggttgtaagcatgcactatgaaccccagtggtgcagcatactagcctgtaaccttggacacattgcctagcctcctctgtgcctcagtttactcatcggttaccttggggacaatcatagaacatgctgcaaaggagtattggcagaattgggtgagttcatgcgtatgaaaggactagaagggtaccttgcacacagtaggtgctcaatgaaatggtgattgtgtaaatatttgttgaatgcctactgtgaaccaacatggttggtggcattggggatgtaagtgtaaacaagataaatgtgatccttgccttcaaagctttcagactagtgatgttacagagaagtaaacaggcaattccaatatactgtgacatgtgtgaagatggagaaagtacacagtgccatggagcatatgaggggtacctaagatagatttgcagaggtgcagagaagactccgtcacagaggctgtatccaaggtaggtgtgatgaatcgagagatgctgctttggaccagggaagaaaggaggagcttacatccactctcgtccctctccagctcatctcccacaccatcagagggatcttttaaaaatgtaatttgagcctccttagagtcttaatagcctcccatggcatttgccataaatgtgaacattcttagcacagtctttaggattctgcatcaggcttctcctttcttgggtcttttctctcactagctcttatgtgctctgggaaattctaaccatttttatttttgaaatgagtcgtgttgcttccctccccaccctcttgtctaagttcatctctacccattctttatatttcagagcactggtacatcctaaatggccttcagaccacggaaggggccccatcacaacacccagcttccttattatagcacatagccatttatgtacttgcatgtgtgactctacctctcccagtggggtgcgagccccagacagacagggatcttaaatatttttatccatcttagactctagcactcagcactatgctgtgcagagtgagccctccacaagttatttgcagaaagaaggaaggctccttgaaggtgagtgtgattttaaactgcgcactccgcaaatccaaaggcccagcaatgctcatcacagattctgtagtaaacatcaacatctgccttcttggtgctgcgttcgtgtgcccagacggtcaagcacatggctacccactctcaccttgctgagaggtcaagggactcaagaagaccaagtgctggggcttcagtaaaggaatccaagtggagctggagagcaggatggatgataggaaggcatcctgggtcattaggtgcacaattttaaatgcatagacgcatgccgtgtgtaaaccaatagaagcagtaatcactcaggaacatctgcaatgaaaactgaaaaggtcattatctttgtgttgagacagcatctgcttatggaattctagaaagatctaaaggccaggtgagctctagtagaaacagtgaaaacactagaatcacacagttgagttttattcatactaagtagaacttggagaagttccttagctttctctgtgtgcctctgtttccatatctgaaacatacagatcatatttacttacaaggctgtgacaaggattagaaataacatgtgtagagaggatagcacaggggcgggcacatagtaggtggtcaataaatggtgactggtgaccattatccctctcttccacatcattaatttccttggcttcaggaactcagcaaaaattttaaaaaaaaacagagaaattattattgcagaaaataaggttgataaaaattactacaagccctatgttaagacttggaaccataatagtgaatgaggaacaaagactctggcctcatggagcttggagccagtaatatttaacttacatgtaaaggaatttttccaattaaaaaagcaaatggggaaatttttttgaagtagcaaaaggtattatcagtagactcacttcttcaaaaatgaccactgtaaacattttgctgtattttcttcagttccttactgtatgctaattatttttactgaaatctataacctaagtatattccttttcctgtgttgttgataatgctttgtgtaagtcattttttaatgactgcataatgttccatataatgaatgaatttactgaagcaattacctgttcttatacattcttgcatagtctttttcctcatatactttcaaatgtctccttagcataaagtctcagaactaaaacatctggataaaaagctagctggagattttttaaggctctcgaaacatcccacacaactcttttaagcagtgtataagcaagaaccaattatgttgtagaaaatatttcttataatgtccctttaaaaagagaaagaggattgaaaattctgcaaagaagatactaagttaaaaccaaattaatcatcctggcttagcttggaatgctaaatattaatgttcctctttagcatgtatggcatattatgtacaattcacctgaatataaatagtccagattgtgacattacattattcatgatgaatcaactgtccatgctctgtatggcgcatcactcagatatgcaggactctcgctaattaatcagcaggtagaaaatggattatattccccaggaagaggtactgaatgggtataatgtttattgagcatttattatgtgatagttgttttatataaatcatctcacttaatgaacagtccttaaggttggtaattgatgtgctgtaggctccccttccacaggctgcaagaactcctccctcctccatcccaagtcttcatgtggttaatgtgtaattaacaacactccggtaaagagaccaagaactatactgcaacatctttggaagggtattatttttacctgtctactagaaaggttagttggtaacaatcagaaaataaagagctcaggaggagagaagcaggtcatgtgataatgggcaaggtgaagcttcggatggtcagtctcaacatcctattttgttctttttttttgtttggctcatttgtggtatcttaaatatttttgagcatgaccctctcagcactacagactcctaaactgcatttgagaaggagcataagggatcctgcatagtccaatcattctttgaaaaacattgaattagaatcttcagtaatctttaggaatgcagtgattttagttcatgagtaccagtgtctattatccttaattacacctttggtagcctgtagatatttagccctcggtcatatatgagcacatggaagtctgtggaattatgtgccattcaacaaaagaagtgttcttgtactgtttgattacgtacaaagtcattatattttctgattagtttgtagccagttgggagactctccaagctggattagggagctcgggtgtgtgtggtggcttttgctggatgggagcattacagtgaaccaggtctcatttggttttggtgagaacatgtctacagctcataaaccctaatatggggcatattagcattgtttttctgataacccagaacgggtataatgtttattgagcatttattataatctcaagtttcctttacttataaggcaaacgaagaggataaataaagaatgagtgtcccccagaccatctggaaaccccacctgtgcatcttaaataaggaaggaccaagcagatatcagaaagaggtgagcctaaataattgtgagccataattgcaggacttggccaagaatgataggctcagttactcctctgtgacttccccattgcaagcagcctctggaacattttaggaagcccagaatttaaccaatccatgtagaagcttctctggtttagtgcgtgctgccatgatggcagtgggcgatggggagaaattgtcaagatggcagccaatttgggataggctttggttccctgaatcctccagcagagggacctgctcagctagggagtcttccaatctcttagtggactggagaatcactgacgtatgcatgcaaagcatcttgctacataaaagctgtgatgttttatgactatcgttattgctattgctgttcaaacagaggtaaggcagggtcagtcctggctgccgcaactatcaagtatgtaatttttgccagatttctttccttcaactttcttgtctgtaaaatgaaataatagtgactattatctcttttcttctatttactaatctataaaataaaataggagggcatagtatctatcctacagagatgagggagtttggagagagaaagagagagacagaagttatcaaaagagttacaggtctttgataactacataatgctgtataaaataaggggttactgttacaatgtaattgatcatttaggtgaaaacatgcacaacatttaatggcaaaggaagaaatgtatgaactataacccaaaactcaatttctgtcccatgaatttatgttagagaaaccagtcatgaatcaattgcagcccaatatctaaccaaaagaccagttaacttagtcatttatcttgagtctccaagttctaaatcaatattttatgagattctcacaaaaccaagcatgtgaaactaattctcggccacacagcagggccttagccgagtttctatttaagggcatatgctgcctttagggagtatcccagaaggtttgtccatttgaagaatgctttcttatatttctgttttaaaaaaagaaagccaaagatactgttccctgttaactaacattttttgaataagaatgtagattcctaccaagttgtccaagaaagaaaaaaagttcacccctgcagtagtatttgtatgctatcttgtatatgaaagcaaatgctatagaatacaagatgtttgcccttcactgtggcttccaggaaacaacaaattcaaccctgagctatagcaatcagttgatgttaggtagctggtgacagcagtgtgctcttttccagactgatctctgattgtcttttctctttgcattttgttatgtttaaaaacacaagggatgttgggggaacaagaaactaaccagcctgcaggagtcgctggaggtaatgctataaatcggttggtatatattcatttatttattgacataaaattatacgaagacccttaaatttaatgattgctctcaacagtgtctaatacagtgattttcctcctctcccagaattagagattttagaaccaaaaaggaccgtagtccaagtcctcattttattgtatgttgaaggacatgggcttcaaaatcagacacaccagattttgaatgctgactttgccacagaatagctgtctaaccttaggaaaattttccaaactgcctggaccttagttttctcatctgtaaagcagtggtaatgactcctaaaccgcaagacagtttacaataataacaataatttatgaaagtacttagcgtagtatctggcacacagaagttgcacaaaacatggttgttactatatttaaaggtgaggaaatagataaggcactggaggaattaaatagacacttccccagctactcaggaggcggaggtgggagcatgagttaagtctaggagttcaagactgtagtatgctatgatggtgcctctgaatagccactgtaccctagcctgggcaacatagtgagaccctgtctcttaaaaaaaaatacttaatgctgggcacagtggctcacgcctgtaatcccagcactttgggaggccaaggtggatggatcacaaggtcaggagtttgagaccagcctggccaacatagtaaaaccccatctccactaaaaatacaaaagttatccaggcatggtggcgggcacctgtagtcctagctactcaggaggctgaggcagaagaatcacttgaacctgggaggcagaggttgcagtgagccgagatggcaccactgcactccagcctgggtgacacagcaagactccatctcaaaaaacaaaaccaaccaaccaaacaaacaaaacccttagtgagtgttaaatgcattattggattaaaatacaaatatcccaaagtgagattggtcacgcacatctacctactataaaaccggaacaagttcacatgctgatttttcagatttttgaatggaacaagatagaagaatcgtgagctttcagaaggcacaccatagggattacggattctttaagtccatacaacggggacagggaaggatgtgggtgaaacatttcatctaccatacttacttgattcaaagatatactttcccagcactttattatcataattatcaccatgcagaaaggttgacttttacagtgaacacctatataccaaccatctagtttctataattatattttactgtacttgttttatcacatatccacccatctatctccatccatccactcatccatccatccatccgtccagcttatatttttgacgtatttcaaagtaagttgcaggcatcaacatgtatgttattaactaaagtttccttgaaacccttccttgtcaagccctgatcctttgtcctccagaaccaacaactgttctttttttccaccagaggttagttttgcctgttgtagttttctataaatggaatcatacaatatgcactcttgtgtttgaattctttcacttagcataatgtctctgagatccatctatatgctgtgtctgtcagtagtttgttcctttatcttacagaatagtgcttcattaggccgggcgcggtggctcacgcctgtaatcccagcactttgggaggccgaggtgtgtggatcacctgagatcaggagttagagaccagcctgaccaacacggtgaaaccccacctctactaaaaatacaaaattagctggacattgtggcaagctcctataatcctagctacctgggaggctgaggcaggataatcacttgaactcagaagccggagattgcagtgagctgagatcgtgccactgcactccagcctaggtgacagagcaagactccgtctcaaaaaaaaaaaaaaaaaaaaaggtgcttcattgaatgaagatgttgcagtttgtttattgttcctcagttgatgcacaactgttttagcctttggttattatgaatatagttgctactgacaacttttccttaggtacaagtcttctgtgaacacatgctttcatttctcttggataagtacctaagattggaactgctgagtcataggatagttgtgggtttcattttatgagaaactgtcagaactttttccagagtggtcggccaattttaccctgccatcagcaatgtatgtgaattacgtttgctctgtgtccttgccaatgtttggtgttgtcagtctttttaattttagccattctgttggatatatggtggcctcttattgtggttcaaagacatacttttattttttttcacatttgatgttatctcagatgcattttacaatttatgtcaagatttaagttagtttgttgttttttatttttctcctttcccccaaaaagaagaattgatatatacaatatatcaattgtgtttcctataatgaagaacattatggaattgagaaaatgtaatatcttaaatcttgctgccatgagctccaacataaggaaccatctctgtgatgttaactgctccataccaaaggcctaggatcataatgtataatattctattacacttcctagagcccccttttctaattattctgtgcaaccaagatatccaaagggacacatataatgaatcccatctcaggtcagttgcaaggtcaaaaggccctgccttgatgggaaatcaagcaaacttcatggcgacattgaaaagccatgtccaagtctttgagagccagtcagttggtacttggaaatgctcaaaagactaggaaagtaatcacttggctttgatccattagctcagctgtaatgtagcagagctaatgcagtcataggcagcagacagcttctctggcagaaaaaaaaatcaagagttcctctcacttttgcaatgaaaattaaatgtggaaataatttcctgctcctttttggaatattactgtgctattaactaggctaagatcattaaaaagtaatgacatgaagttgcatgcatcattattttaagagagagtgaatgaaaatatactgtcgatcttttctgcttcttgccttatccctggcttaatcaacattggtaaggcctagagtgaacatgtattttaatattaaagttatagctttggccttgaaaaaggaaatgtggatcattagaaaatggattgacagccttcataacacatcttcctgattttttaaatcaagtttttattaatacaaaattaagagtgactctcaaaaaactgagttgctcagaaaacgaatagaaagttcaccactggcttgaaagaagtaactaggtttttttcctcattgctattttcaggggaaaaactgtcagtggcaaattatatgcatcatgttacaatcgctgagacctatttattcttcaccaatatgatggctcctaaggtcctggagcaatgtaaattaagacaaacagtccatcccactgaaacataggaaatttgactggttgcctagcatatcccacatgcagaatgtctgtatgtgaggaaaggaggatgcatggatctggattctgaagaaacggctttggtaacaatagcacagattctcaaattacagtaactgccttcatcgcctactcttccctccttccagcacaccccagtagccactcctgtaacacaggtgaacagcgtggtggtaacaggaaactaatcagaagtgattgcaatattatccgttgtctggacagatgtcatctgcgcccagcctgaatatatgtatcagatggggtgagagagaaatgagatgcttctcttctcctgtcttctagggttggaaggagagctgtaattggcctcaggtaggcttgtttaacacagatattctaactgcatcagcggtgaaggaaaggaacaaacagaaaatattatgtcaacaaaatgtcgtctaatggggtgaatagatacagaagcaaaacctgaaagctttattctcctttcacgaagtttgctatcaaatctacaatattagacctctatgtaaatttgaatattataacctaacatgttgttgttcataaatgtttatttccccctaggccaaagacaaatattttcgccgaggagaatttggaaaatttcgcagtatataaaaaaagaaaattaaaagtctccatcataccatctatcagcaaccattgttagcacttttgtgtatttatctgcaagtacttcccctgctcccacctctcgcttttagataatttacataatgatgatgatacactatgtacagtttcacaccctgctgttttttccttaacatacttgcctaaggttgttcctatatcattaaaaaattctttataaaatacagtctttcgaactttatactcttagagagttttgcacaattttatttgcacatgcaattaaacattacattatttgtgtagggtttcagttatactcatatgggaaggtcttagtactcactgcaaaacccatgttaatggcctttatgagtcattagagaacttgccccttaatatgtccaaaaagatagccatagtaaaatcccttatggacccttcttcagcagagtgttttacccagacagaactggactccgaagtcagggaactcttttggactggagaagaggtagctcctctggacccataggcccagggagcctggggcagaaaactggattccaggactaaggctttgagctcgtagtctgacagaggaggaatggaataatttaggaagtttaatgctgagtagttagaagttccctggtcaattggtgaaaagaaaagtcaacataggtctgtaaaactgcttcaatgccaaggtgaaaatttgcctgctttggagtcagagagatgtgacttctgatcccacacttagaagctgtgtgtgcctggtcaagttgcttaaccttctgagattcttttttcatcaataaaataaggcagataactgtacctacttgatatgattgttgggagaactaaatgaaataatgtgtgcaaagcttttaatatgtcataaataaatggcacttgctgttgtttacaattagggttatcattattttttatttgtttttttttcttgaactttctcaaattcacccaatggtgggttggatgatcttacatacataaacttcagaattggtctttagtttaaactcagttctagcatgtaccagcatgtgcccttaagggctcattttatttatttatttatttatttatttatttatttatttattttgagacagagtctcactctgtcacccaggctggaaggcgtaatctaggctcactgcaatctatgcctcccgagttcaagcgattctccctgcctcagcctcagcctcccgagtagctgggattacaggtgtgtgccaccacaccctgctaatttttgtatttttagtagagacagggtttcaccatattggccaggctggtcttgaactcctgacctcaggtgatccatctgcctcagcctcccaaagtcctgggattataggcaggagcccctgtgcccagctaagagtttatttcttaagcttctatgttctctctgaagctcagttgacttctacccaaagtacacagaatgaagagtatgttgctgtgaggttgtgaggaaggaataagataatactcagtaaaaggtggaaagatacttcatttaatgaaatacattgaagtaggggtaaacttacttgcatgctgggcaagtacatctactcccatgaagttgatcatatttgcaagggtgtaggttgtgggtgtttatgtatctgaatatttgttaaaatgttcagttctgatgagctgaatacttcttgaaatctaggcttggcacatttgcagagggatgtgtgtcttggtcacaggtaattaggacaacctagtgggggtctttgatggggcaggacaatgcactctggatctggtcttggactggagaattagattattaggattaggaagactttccagagcaagagatatcaacacttaagatacctcatatccttttcccatagagtgtgcacagccctaagtaatcacagggcctccattgctaatacggattttcctggggacagagcaaattataatttggttttcaggatactctttctcagaatcatacatcatctctggataactgtcggtctctcaagaacaagatcaggaaagagagaagacttgtctaaatctggggcttagccgaggaagaatggctgaataataagatggagtaaatattccgaatgaaatattcatggttgcagaaaataggatctgtctaataaaatgatcgcgctaggtttcagagccccctatgcctctctgcaaattatcccccaatcacatctctcctgtgagcattaaaatatataattaatgctcattgttaataatacatttctaatttccagttgcaaagatacagcttttccctccattggaggatcacctatattttgtcattaacattttgtcataagaggcaagaatgatttaaatgaacaataaatcgacaggcaagctgctgatttgggcttaagccaaactctttggggaaggggttcatttatcacctgggacttagtgtagttcttctgctgatttatgtggaaaggaatgagagagagttctgtggaagggtcttgcggccctgggggattagtaacaataaatagagtaactggagcagcagctgtcacagtcagagtaactccagctgagagaaggatggaatttctggttattggaccagttctggagaacacctggcccaagtgttctgaatatccagctgcctattgtacatctccatttgggtattccactaacacaggatactcaactcccaccaaactctcttctcaaatgtgtttttcttccagggtatcttttcttatctacctgttttgtcaagtcaggaacttgggggtcacccagtgacacctcctgcatcttgccttctacatccaaataatcacaattcttttcaaagcattccctcttccattagctcaccaggtccccacaaaagctttgagatgcaggagaagcagaatttttatttccttttttcaatggaagaaactaagggactcacccataaccatactgataatgaatgactttcagtatttttatatcaatggtccagtgttttccccagtataccatcttgaatgagaaatttgttttcttctttatctctgacttctcttactttgtgcccaataaatctttctgggacctcgtggttactctgtcttcccaggtccccacaaaagccttgagatgcaggtgaagcaagatttttatttcctttttggaatggaagaaactcaggaactcacccataaccacaccgataatgagtgactgtcagtatttaggtgtcagatatgtttaacccatttatgccagagattgcaatttttttgaattgcagacgtgtgagaaatcagacctcagcgatgaccttgagcagtaggatataaataactcccacatgcttagcgttccagtaatggaacactagacatacatgggttttaatcaatggtccagtgtaaggaattccattgtaaggaattctcctctctctcagggagtaaaacacagacagtattcttttacctagtttccatcaaagcttgtgtatcctatgtcccattctctaagaatcttttttgaatttgttaatgtgttaattcaatgaagataagccgaccatggttccatgcactcattaccttctgtagataacatttttataatgacatttgctcatccttcaaacctaagtgactccaggtattaagttttattcttactcaaggaggaagatggtcttgagagtacgtccagtacagatctgggttagagaatttgattaagaattctctaagccacatcaggaatatcagaatctttcactttgctcttttaagggaaaggatgcacaaaaaatggacatttaagcagtgagcatgtccttttatgaaaactcaatctacttggcccattggagggatggtggtcaatgaatgaccttccattgtggactgctttgttgtgcagtacgaatccttgcatataattgtgtttggactgcataaaaaacctgttctgtggccaggcatggtggctcacgcctgtaatcccagcactctgggaggctgaggcgagtggatcacctgaggtcaggagttcgagatcagcctgtccaacatggtgaagccctgtctctactaaaagtacaaaaattagccgggtgtggtggtgagcacctataatcccagctactcgggaggctgaggcaggagaaccacttgaacccgggaggcagaggttgcagtgagctgagatcacgccattgcactccagcctgggcgacatagcgagacttcatctcaaaaaaaaaaaaaaaaaggcaacaacaaaaagtctgttctgtgaagcttcttaaaaaaatatgttcagaatctaattcagaacagaaataataacttatttaagatcacacacaactcaagtccaagtactttcatgggccagaatccagttagttggattcctggatatacaatgttggggggaaaattaaggttttgagacaccaaagtaagaggttccaaagaagaatggcgaatctaggactcttggagcaaactcagatacaccttgctctaaatatggttgcacagcacgtgagccatgagatcctggaacaagctaattaatctcacagactttctgttttatctgtaaaattgagataatgacaccaacaaacctccttatttttaacctcacaagtatttaaggatcaccaattagtgaagctatgaaaatactgtgcgaactgtgaaataccatgcagatgtctgggtgcaaaaatgcaattagagaatttttatttcttcaaatggagctgcacatgtttgtaggcattttaaagcaacgaggaagaggatgagataatgaaagctaggggattatttttaggatcttgaaattgtgtctgttaaaggtttttggctgtaagcaacagaaaccaaggctaagcaaaaagggcagtttataggaaaatgtgggggcatctcgggatacgtatgttcagtgattatttgagaattgagtggacaaaggctaagataaagtcagaagaagcagtggtgttatgctgacaaaggtgggtagttcagtgtctttttttcttagggtgtcaaacttcttgggtatccatattcctactcttcttctcaatatgactcaaatatcgtcttctgtttttgtcttcagcctgggctggaaatggttttcccatctagaaataagcatgcaatgcatgcttaataattcctttcagccttaactttccttcttagattaatgaccctagctgagaacttttcagcagagaatattttcttttgaaccataattgaacttctccagttggtctcagctccccattcctagaaaagactgataagccccctgagtatctgagtcccttcatgagcttgtctagctctttctctgtttaatggctgtatctctcagatagacttatctggccttctagttctgagattctgatctctaagtggacttcatatggcctttggagtcctccctctgtaaatgaagtggttagccttcagagggtctatgttccaacttcttcttcttctttcttttttcatctttcttcttcttcttcgttttttgcttttgagacacagtctcactctgtcgctcagggtggagtgcagttgtgtgatctcagttcactgcaacctccaactccctggttcaagcgattctcctgcctcagcctcccgagtagctgggattacaggcatttgccaccatgctcagctaatttttgtgttattattagaggcggggtttcaccatgttagccaggctggtcttgaactcctgacttcgagtgatctgcctgcctcagcctcccaaagttctgggattaaaagtatgagtcaccgtgcctggcctcccagcttcttgattggactgatgtagcaatcagactaagaccccaccccgcaccctttgagcggagggtcctattcaaaatgatcacagagaacaggcttgtctagcactctcaaagtcagaacgtctagtctcctgaatagaacagtttgcccctcaacttgtgggatttggatttcctggggcccttatgctctatcatgaagcatccatctctagaagtaaaattgtactaaatttggtgaaggggctttgttttccaaagacagtgacttctttcagttgagctatcctttaaagaaagttgtaggatggaaaactctttttttaagacaaagcttattcatgtggatttcttttcttgtttgagacctccaggaggcagcttctatttggggctgtgttgtaaggactctcatggttctgtgtgtgggcctcctcaacgctgcatctttgctgatgcctgctctttaacgatatatgctgaaattaccatgttttggctcaatcgatgctatttccaattgtacttcttttggaggaaataagcccttgggatgtatgttatgatagtggagccaaatatcggattccatctatgctgatgaaatgagtaatacaacccggtgtgccggaggatcgtgttatacacaaatacacttttccaaggccttttgggaatgagctaatacaaggatttataattaaaactcgcagggaagtgggctatatttttatccactggcctttaagatgaccagatccacccaaacccttatctttagctggttgccaaagtgagcccaaaacacaagtagatgttataagccaagatctcccatttgtgtctcccaaaacttttaggctatttagaaactcattggaggtgttctttgggaaggaagagcacgtgtgacaggttccagttgtctcagtcataggtccccactcccctctttattcagagatactatttttatgcgttaaatatggagttccttatttcttttgttgggagaatcttaggtttaagccacagaaacagattagcttacttaggcgaaaaaggaacttagtaaagagaaatgaggagacacagagaagtaaaggggaagctggacaatactggaagataggactggggacagcacctggatccacgtagcagcaactaatagaccaaaatttcatggtgccagggttgggctccagtggtttagggactttgtgttaggaatttgtttaggaattcaaattcccaggcataggagtctgattggcttagaagtatgactgggttgggtaagtgggctcattcttaaaataatgcgttttaaaattaagtaatatattgatgtctgtgatgagactgtattgaaagctgctgaaaaaaaatgggaccttgagatgcatggaaaaggagccaattatcatagcttattttttggtgctcattttctagcaacaatgaaatctctacctcacctcttcttcttactcccacccccatactcactgctggtattagattatagctgggcccctccatggcttttgtcaggtatccactctgtccaggtgagagtggaaataacttgactgagtttcccaccaagacagtgtgggaggagtggtttcctggtgtagccatggatgtcgggtgaggacggaagaccacccggacaacaacaatgatgtcatgcacaaaaagattttatgctaagaagaaacctgaagactgctggtctgagtagttatgccagatatttaaggctaaccaatggtctagaagagcggttcttaaagtgtggcccctgaatcagcagcatcagcataacctggaaagttgttagaagtgcatattcctgggccccacacaaacctttctagttgaaaaccctgggagtggggccccaaactctgtgttaataaaacctccatgtgatttcgatgcacattggcatctgagaaactttgatccagtcaatcatgcagaatgctaagcacatattcagaaactcctttattcctctacttctaaccctatatttgcattttcttagttccccccactagttctgcattcttcgcttcaaaaaacagttgaaactccttggaatgcaatgctctccctaaccccatatgcatttacaagaccagttctcttgcaagaatgaaactatgaagctcacccactttgacccagcagcatcctgttatctgggatggaggaaataatgttatattctaggtgccaaagaattttatttttatcagaaaaaaaaaagaaatttagatataggcttgggaatttggaggggttcaggagttgttttgacaggattagtttgtaaagtactaccagatcactagggtgaatgacttagagaatgctaaatattctctttataggtgaacttctaagaacttttaattagctgaggagaatcgagaatcttcaagaaggaaatgaaatgcaatgcaagtatgcaatgttacttaactctgtcccatcagtgaacacactctaggtaaaacatagatgtagacaatatgcctagatattgtgacccttcctaaactcttccctgtgcgtggtgctgggaagttttctgatgagcatgtgttctgaaatatttagtggtgtcagtgaaatttgacataagggtagaaatgaagtcatccatcataaatatttagctcttactttccaagttaatgaatgagttcactggcctgagagttgagaaatttggtctcaggccctgggttgtgcattagtttcaacaatttgaaagatctggagatgaggatgttggaaaaaatctcaagggctctgtgctgttctaatcccgtctgaatgttaaaattttgaaagaggctatcatattttatggcattccaattgcagcaacttatctttaacattcaacttgcctttttatgaccattcctatttgacatttggagtgctttggaacattcccatactgccttagcacttttttatctcaaaaacaaatttgactggacatctttaattgcctgcttctattcagagcaaaataaagtaaaatttgggatgaaaaacctctgacatgaaacctccaaagacagtgaattacctgatctattgttttcttcataataaatttccgaagctcatatcatgcctcctggttgccaactgagaatttgtcgggtgagttatttgataaaagaccaagcttaaattaggtccatatttcaaaagatctgactgccctagggactagccatacaggtataccaggtgctccgtttggagcccttagaggagggccgtggctgtttacggcacaaaaaaactcctgagtgctgaactggcttgcagactcactcttctatagaagttgtattggcataatttgatgcctattttctaagaactcgctctgcagagataagagtataaaatcatgaactttagagtcagatagatccggattcatattttgtctctgatatttataagttaagttatctttgaaactggcccaatcatcccatagaactaatgtttacagtttttcgaataactataaaaattgaccctctagtcttaaaacttgaaaaatttacatttatcttatctgagttcctttctcaggaaactgaccatcaggtctcccagatagtatcaaggaattgaaaattaacagatcactgtatctggacaatgagaggccaaacacttcattcatcatgattgcttccttacccctccctaatttctgttttcctaatcaaccacctgcttcctgttgacaaactcctcttccttaccgctacttaattcctaattcctgttttcttatacgtagctacattccttccctgctatataaacccccacttctggtcagctggggacatggatttgagactgatcacccatctcctcagctgcagcacccagttaaagccttcttccctggtaatacttgttatctcattgattggctatctgtgtggcaagtagcaggacctagactgaacccctggcattttgataacatcttgatggttaataataacgttgcaagctttgttggcagggaaatgagttttctggagtgctaggggcagatatttttttcagggacatctaagaactgacttaagaatggaacgtgctttttcccccattacatctgttaagaacatgggtcttgtgaataccgaatatgggtttgagaaccaggagaacttattttaaatagaaatacatagcttgtcagcgaaagtctttgtgcaattctaatgcataccttgagtatacaaaaatcaaaaattaaaaaaattaattaaaaaagcaaaaatcaagaatactggtaaaaatgtgactctctaaatttgttgcatttatgtaaatgtgtacctttcagagacactgggggccaagggaagctaaaatgagacacattgcagtggcctttgttttatatggccacctcgcattcaataggtttctgtatccttagctaaataaattggttatatcggggaggagggagggagaaagagagatggagacagaaatgaggagggaaggggaaagagggaaagagagagagagattttcataaaccaataacccaccccaaatgttgaacttatacatgagaatctctataactgtaacccacatgtaacttatgtatgagaatctgtataactgtaatctgcacataactaggaccctatgtggccctgtcttatataatgtctcattttcatcagaaaatgttaaaaacaaatcaaagctttcttcaaactcttgagaaaatgacaaaggaaagaatcatttctgatgtcctatgtatctcttgaaaagtttctctatttccctgcttccagtctcttacattcttaggaatgcttccttgcaaactctcgcctctttctctgtactgcccccaaatgctgcttcatatataatctggtaggctcttctgttttcccacttttcttcctgcttttgcatttttaaaattgttacgtatagatcaaatacatttctatttcttcattttcacctccattttagcactatttggattctgcttgtattagtcagcattctccagagaaaaagaaacaggtgtgtgtgtgtgtgtgtgtgtgtgtgtgtgtgtgtgtgtgtgtgtgtgtttctatccatctgtctgcctctctgtcatctgtctctatgtctctctatctacctacctacctacctatgtatccactataaggacttggctcatgtgattttggagactgtcaagtcctatggtctgtagtcagcaaactggagatccaggagagcccatggtataaactgtagcctgaaagctggcaggcttgagacccaagaagagctgatgtttccacttgagcctgaagaccggaaaaggccagtgtttcagctctaaacagccaggcaagaggagttcccttctacttaaaagagggtcagtttcttggttctatttaagtcttcagtggattggatgaagcctgtataccctagagagggcagatacttcactcaatccaccaactcaaatatcaatctccttcacaaacatcctcacaggcacacccagaataatctttgaccgaatgtctgggtaccccgtggcccagtcaaattggcttatactttctagtaaggaagatctcatgagctggaccaagatcttttcccttttacaggcagggagtagggaggagactgactgtaaacataatttaatatctcatcctcttattcaagtcacaatgaccttgcaagatcactatgagaattagagatgatatacgtaaaacagctagtgcatagcatagggtagaagctcaaaagaaggaagctatattgctcaattattcttggtttctctcagatttactgtatgttgttatgctggatgtgagacaatacacaaaacacaagcaaaagaacagtgagctctgctctccaagacacaccccctccaggtggttttatgggtgagtgttaatgcaatttaatgcagcaattgacaaacgatggtttattctacacagtggtaggacagcagtagactctgtggatacacagagaaataagacaaagccttttccctggaggagctcgctttctaatagtaaagatagtctggtaaacagataaaaatcaatgtaaaaagtgctgattagagacacagagttcccagagcacagaggatggagtgacaaaacccacgtgtgagaaaaggaggaggctttgatctgagttttcaaagataagtatgtgttctccatacaaaactaagagaaggaaaatagcagttattttgcttattgtgtgttaggcacatccatatctttcaaattttcatgcataaaatttttcacttatttctaatgagagttcctaggaaatatgtactagtatcctcattgtacagataaagacactagggctcagagaggttaagtgacttgctccaatttacatagcagggagaagggaagcctagatttgaaccaaggtgggttttttctgttttttgttttgtcttgtcttgtcttgtctttagaagccctctatgcctctgattcctctgtaagggaatgacttcaaaggtgtagagatgtggacaaggccaggcacagtttgaagatgttttgggaacacgtgatcaagggtcacattacaggaatgttgctctttttcggggatatgtccattgatgacagagacagagaaaagaactgagcaaaagatgcatagtagggagatgggaattgaatgatgacaggtttggggaatattgaggcttgtctgtcctcacacataaaagtgaagctcaagcttgtaatgacatatcattaaaagtatagtgctcaggtggaccttcttttaaaccccagctctgtcaattatcaaatgtatcacttggacagctgagcctcagtttcttcaactgtaaaatacaaataattatagtatccaacccaaaggattattgaaagtgaaactgaggcaatgaatgtaaattgcttagcaacatgtctgatatatattaattgttcaataaatgtaattgttattattaccatcattcattgtcttggcagggtgtagactcatttttcttgtgtgcctaatttaaggaactctaaagacagtcatcatgcattcctgataggttctctgtgtatgggtgcatctgtgtaatcatatgctttagatacagctgtgcctttcatggctcctagtaatttatgccaagctgctggtctcatgggctatttgtgtttgttctgctattacataatgcctgattctgttacatgactattctgcaactcatctgtaagaccgatgaaagcaaatctctgtgtgcacctatgtctgtaaggcaggaggaggtgagtgctattgtcatgatattgttggagtctttggctaaacttgccaaagtttagcaagtttagccaaagattccagtgataatgcagtatcaattctctgaagcacatttaattagattgcgttttccatgcacccattattgtgcccagtgcttcatccagatcagcattatcaaaggctttgttgtcccgtggtccccagtgcaaattttgacatggccattcattgtgtgctcttgggtgatttctttaaattctccaaactcagtttcttcacctgtgaaatggatgatgttccacatacctttagggaagctgtgaatatcgaaataaaggatccggcacctagtagactttctgtaaattggaagtgcttaaagttactccgaacattcatccactagactttaaatttcaaaagcaaagaaaaaaaaaaaacaaaaaactatgtctgtcttgttaatatttgtatccctgtgtctatcacatagtaggcacttgtgtgtgtttgtggaatgaatagtcaactaaataaggcaggtattatttccccctgttttacatacaaagagacagaaactcaaagagtttaaataaattagccaaggttaccacagctaccaaatggaagagaagggatttgaacttgagttatagtgaattccgaagacctttttatttccctgaaatttgagtcttgggtttgccagattttctataaaaaagaaaaagaaaaaaatagagttcaatgtcttaatctccctctgaaacctgaccaatttgtcttagagaattgatgttatagttttttttttaatatataaacatggacattgaccctcccagtcttaaagcttgaaacttacatttgtcctatctgagttcgtttctcaggaaaccagctgtcatccctcacagatagtatcaaggaactgaggcttaccagatcactatatatggacaatgagatgctagactcttcatcatgattgctttctttttttttttttttttttttttttgagacagagtctagttatgtttcccaggctggagtacagtggcgtgatcttagctcactgcaatctctgcctcctaggttcaagcaattctcgtgcctcagcctcctgagtagctgaggcacaacatctggctaatttttgtatttgtagtagagacgggttttcaccatgttggccaaggtgatcttgaactcctggcctcaagtaatctgcctgccttggcctcccaaagtgctgggattacagacatgagccacctcacccagccaatgattgcttttttacccctccccaattcttgttttcctaaccgaacccctgctgcctgttaaccagcttctcttccttaccactccctaattcctattttcccacatgtagttacatttcttccctgctatataaacctgtaattttagttggttggggagatggatttgagacttacctcttatttcttggctgtagcacccaattaaagccttcttccttggcaatatctgttgtctcagtaattgactttctgtacggtgagcaacagaacctagatggtactcctggcattttggtaacagattttggttgcccaactgggaacgtgttgtttgtggctcagctgcaggggctagaagtgttttggaagcacttctaagcagctgcttgaccatttttggtcagaggtgggttttagtctctctctttggctccaccactgcctgctccaactgtgttactaatcgctaaggaagaagagcctttgaaatttgacatctgggtgtggatgagtgaatgtcttccgtgggtaccagacagcaggaatggcttcacacattccagcaaatatcagtgatagactggacaaagaaaatgtggcacatatacactatggaatactatgcagccataaaaaagaatgagttcatgtcctttgcaggaacatggatgaagctggaaaccatcattctcagcaaactaacacaggaacagaaaaccaacaccacatgttctcactcataagtgggagttgagcaatgagaacacatggacacagggaggggaacatcacacaccggagcctgtcgggggtgggggaaaaggggagggagagcattaagacaaatacttaatgcatgtggggcttaaaatctagatgacgggttgataggtgcagcaaaccaccatggcacatgtatacccatgtaacaaaactgtactttcagcacatgtatcccagaacttaaaattaaaaaaaaaaaatgatgctcatgggttgggaggcatttctgattgattaagaaagggttatgatatgggaaaatatgtttttaaaaattgtgatatgttctcatctagaaaatgctaatatctgatagttcagaatttttttgtttttcaggtttttactggaattcaaggttactaagaataagaactctagttaatagataataattctgtctgtaaaatgtgccaaagaagatgtgctcttattgagaaaaaagaatagttttgtcgaaaattcagaagttacctaaagtttcattaaaatcatggacttagaaaggttatttataaacaaggtagaaaggaaccagtacatagaggagagagatatgaaaaagttaagattggtcctctatgttagaacaaggggatttgacaagagactgatttgacaagagattttgattttgattctataatctgtttctttttgaaaacttctcacattcccacctcagaagtgtaatttcattatgtcttactagtggctttcaattttttcctccacttgaaaaggactgagatgataactttctccttcaacttttttgtcagctactgtaactttttacctctggttctacctgctgctgtctaactgcctgacgctgaaatgtttatcttgagggtctagaaccataatgttttcccccagtataatttgattctgtacaatttggattttcttgatatgtctaaagtgttcattggatttgactttcaggttatctaagtaggcttttcataaggagaagccatcacactgcagaaggtctttctttgccttttggtaactggttaggccagtttttatgttttacctagataattcctatgtcatcattcttagttttgtttttttcaaattgcttaaaaaaactaagatttaaggttttgtatccatgtaactttctaaattacttcttttttttttttttttttctgagacagagtcttgctctgtcacccgggctggagtgcagtggtgtgatcttggctcactgcaacctgtctcctgagttcaagcagtttttgtgcctcagcctcccgagtagctgggaccacaggcacgtgccaccatgcccagctaatttttgtatttttgacagagatgggattttgccatattgaccaggcttctctcgaactcctgacctcaagtgatctacctgccttggcctcccaaagtgctgggattataggcatgagcccctgcacccggcctctgtgttgcttttaaagtccttgggccattaagttacaggactttgactcctgaaaaaggcactgactactgctaaatcttgaacattgataccaatcaaagccccattttcagaccaggagaaggtgaccgtcaaaatgaactgatttcatgagacacagggccagaaataaaaactattcaatccctccaggcctagagacaattgcagaagaggtgggcacatcagaatgtaaggactgatttttaagggctaagattagttataatgttattttttggtggttgtaggtgtccttacacagatcttcaaaagagatcacccatttaggccagtgctgaagatgcagctcagcttcggagccttggaagctgggactcccaggctagagtgtgatctcttaaatggcaaaggaaattcctttgagtcataagcagttttgtaaacttctttctaaaatttgccaagagacaaatcttacctgggaaaaggtcttgcctcttgccctgctgaacatacaaatagcccccagaagtaagtcagtaggtcggctcttagccccttctaaattctcatcaccccttctcagcataaagcagacagaaagatcaatgaccagattccccataattaaggaactgataaatagaaagcagagactgaaaccagcccaatggtcccgcagaatttatgttattggtttttcttgaataaacatagaaattgaccctcacaatcttttttgttttgttttgtttatttttattttttatttttaaaattttttttgagatggagttttgctcttgttccccagactggagtacaatggcatgatcttggctcactgcaacctccgcctctcaggttcaagcgattctcctgcctcagcctcccgagtagctaggattatacaggcatgcaccaccacatctggctaatactgtgtttttagtaaagatgaggtttctccatgttggtcagtctggtctcaaactcctgacctcaggtgatccacccacctcggcctcccaaattgtttagattacaggcgtgagccaccttgtctgtccctcacagtcttaaagcttgaaacttacatttatcttaactgagtttctttctcaggaaactgaccatcaggcttcccagatagtatcaaggaacggaaactcaccagatcaccacatctggacaataagatgccacacccctcacctgtcatgagtgcctaatgaccacctgcttcctattgacctctttctagctcctccctaattcctattttccccacatttcttccctgctatataaagccctattttacctggttgggaagatggatttgagactaatctcctgtttccttggctgcagcactcaaataaagccttcttccctggcaatactcatcgtctcagtgattagctctctgtgctatgagcagcaggacctagactgaacccctggcatttcaattatatttcaactctgctttcttaaaaggatgctaataggaataatgtttcgttaatgtctatcatgtgccagggaccatgctagatatgttaaaaatgttatctaacttggaaaatcactctttgaagtaaatattgatgttcttactgctcatttggggaaactgaggtcttgagaggtcagataaactgactagtgtcaaaaagtaattaagcaacagagccaagattccaaccccagcctgttggatgccaagattatttaaaaaatccccttccatattttccttgtttactttagcaagagttctgggttcaacactggctgagtatttgggatgaaggatttccagcagacctgttacacgggtccaggcggacaaagagtgaaaggcagacactgaattagaatcaacatgtatgtgaggggctccttgagatgtggctgtttctctacctctaatcccactaggatatggctgaactccatttacatgctgggtgattggtatgtcctaaggcagaatatttaaaccatcagatgcacaaatcagattctagttattaacaaagatacattgtatatcaactcctatagaaaaatcaaagagtaaaaaccttgatgaataattcatgcgtacctcagctatccttcaccattattgatatttgagaactcctgagggaaaattgggggtttatcctgataggaagaagtccttatggagcacctgagatgcttggagacaactggaattcagggtgcccaaacagatttgcactgatcattcagaggatgtttacctgacattgatttactcttcttttttattaaaaaaatcccattttattcagggtagaaatgtacctaactataactcctgatttcccagatttcttgggagctaagagtagttatatgacatagatatggccaagaatatgataacagtttgctgggagaggtttccagaagtttttggtttcttggttaaacaaaaaaggacagctatatctggtatactccctgaattcatcactctatatattatcacacacatccacacaggcacacacatatgtatttcctgttttatgttacccaggttctggacatgatgcctggaacgagagcagaccatgaggagaaagccatgagaatcacagagatgctggcctcaggccattagaccactgaactaaggtcagcagccttctggttatgaggaaggagggacgtatttgttggccattccattacttgaagctaagagcattctcagatgaattagatggatttgctgaggcatgtcttacaaaacctgccacttacaggagccagttgcctgattttcaaagtagatcaccagtgtgttccctctagtggggcgggggacaagatagcctagtcctcacctcctgagctggcctaaaagttttatttttggatcttctaacgaaccttagtttaaggagagagccaggctttcttgcccctacattgtacatctggggagctatgaggtcattggagcataaagtggacccatggaaggagaactctgacaatggctcatatatagatggaaaatgtgagatatttgtacccttttaagagatgtaaatttcccaggaggaaggcagttggcttttttttttcttttagctatgaagatgatggatccagaaaccgaggaatatgttggaatccaggtattgtctctgaggcagattcatcaacagaacccagaaagacagcctggttttttttttttgtttgtttgtttttttgtgtgtgtgtgtgtgtgtgtgtgtgtttgtggtttttttttttttttgagatagagttgttgcccaggctggagtgtgatggcctcatctcggttcaccgcagcctccacttcccaggttcaagcaattctcctgcctcagtctctggagtagttgggattacaggcacccgccaccacgcccagctaatttttgtatttttagtagagacagggtttcaccatgttggtcaggatggtctccaactcctgacctcgtgatctgcctgcctcggcctcccaaagtgatgagattgcaggtatgagccaccgcaaccggccgacagcctggtttttaaggcagtcaccctgtatttgaaatcctttcttagtgttaggaatgaaggttctagagctaccacagtcaatagggtaactgggtttgaatccctcttaactggctgtgtgaccttgaggatgttgtttaccatctctgagccccagtttccttatttgtcaggaaatgatacttatacataaactgtgtgggttggggaaggtgtagagatattggctacatggtgtcttgcacaacatctgacacagaattagacacaggaactagaaatgataacaataagcacaataataatgatagttattattatcactattcaatatacattttttaaactaccaaaagagctgttccatttgaaacagccacagagaaacagagtatcctgtggttagcggggagagaacaccccagtgagatgagaaagtcttgatctgcagaagtctggggctgtgtgtgtgtgttttttataagattgacatctctaaaaagaagttacaagactagctaccaggggagaaaccgatcacaaagccgagtgtaagcaagaattacgctttccttctgtgctacagcaacgctgcaccctctgggggctggttttcatttgtaatcttagtaaatcagccaagttgcagacagcaaaccttgtattgattgggagccctgcaggggagctcaggcaccaggagacctcggaaccttggtttcacttattagttaccactttctggagcacgcaggcgtgtgtgtgtgtctgtgtctgagatcacgctaggataattctatgtatgtgtaggttctggtgggaaggcttccacagggaaagatggttgtattttttaaactctgttgacaggcagaaggtcaagggctatttctcacctttttcttccccaaatgagtgactgtcctaggccatggtaatacagtgcatagatatgaagaccaagggcataaaatggaaatgatcatcatagcaactgcctaatgaagttgtcttgaggattaattgaattaattgactgacctggagaaagagggcatttcagagccctccctccctcccaccctctcttggaggatgcaccctgagctctaggaatttcctaaaaatcttatgtctcaggccacacgttctttcctttgggcatgtcagggaatgtccaaggtgatgctgagaggcatgatgcagaaataagtgtaactgagcatataaatattatgccagatgttcagcaagagattcctcatccttcctctcaattaggccttccaacagaacttctgtttataaagtaaggggtgaaaagctgagagtcatgttgagtttatctcatttccctccattgaaaaggtagcaggaagaaaggaagaaaggagcaagggaaggaagtgagggagaagggaagaaagaaaggaataaagcaagaaggggagagaggaaagtggaaaggagagaagtagtgacaagtgacgtcacagaataaagagttagattccaggcatgttaaggcacccaggtatacgcaagatgagagcaggtgggatctagcaacgtgtgcagagctcgtggctcccaggggcctatccctcccctgacacagtcagacaactacctcccttctctcctctcacccccaccacacagaaatgggatttctgtgggtaataaaccaaaaagactcaggacttaaggggtcaacagagacagtagacagtgggaagagaaatgagtcaagacttgagcctttcagcccttctctcttctcatccaaatgtttagaggatttttatctggagaaactgacatatccctgagaaaagacgtcaagatcctgaaatatggtagctcccaatgaataggctgactcactgcctcatcatcctacaaggaatttcatcagtcaacagtccagaccccatgtgcatggaactcacaaatggcttcttagagtcctgatcttcaagctgaccagaccatggggaggatttccaatgcagaagagagagacccaaacaagcaacctaaaaaaaaaaaaaaaaaaaaaaaaaaaaaaaaaaaaaaaggtggtggagggatctaagaatggagaaatctgcagtatttaaatctgtagaatattaaaataatcagccagaggagttgggagcagctaccccagggagtaagattcaggggtgatgagagttgaattttttttttttattaaaagacttttattaagactttcaacactctttgattttttaataaagcaatgtgtacacattgttttggcaaatataagacttatttttaaaataatacgcttacaagaaagcaatgtttcccattgaacagatgagtaaactgaggctcggaaaggttaagtgacttacccaatatcacatagcaagcaaatccaagagctgaatctgaagccataactgtctttcttacaacctcaggatgttccctttttttaaaaatgagtgattctttgcttgctaggtaaaatcagttttaagaaaaccagttcctgacagataacattcctgttatgagcctcctgtgaggtcagttagcgtcagctggttgttcagcagactcttcaagtcccttgttaaggggataaaactggaggccctggggtgcgtttggccactcaatgcatgattctaggcatgttcttccttgcgaccaggattgtgagtgctgaaactcaatatggcagcccctgagggctgctggaagacaaggaatgaaaaaaaaagcagccttaaatacattattcatgtctgcctgcattgggaactagggaattttgaggaactcttttagtggttgaagaaagtccttccctttagacaaacaaataaatgcatgcataaaattggctcagtgctggaactcccagactatgatgtgtttgtcagggttgtggttttcaagtgttagcaggttttttgtagtttgggaagctccaagaaacatcaccctcttgttctctgtgtcaacattaaaggcagccatgcagagctgctggaagtttagtagatatttataagtagagaccgatagattaggaatgggctcaagtaggaggtggagagaggttgaggaaaacacactatgtcttacttctttgagtctgacaactcaagtgccattggggctgaaatctgggaatccaaatgtgggaggctattatctccttttgctggaaagtgtctttatggaggccaattgggattactagttctgtccattgaaatttatttcctcttggaaactttcttgacttctcaccttcctcaccactggataagttagagcttccatagaaatccgaatccagacacctatctacatcgcctatgttagcacttagtacagttagtggaatgtttggtttattttctcacctcttctacttgatttttagcagcaaggttagggactgaacctgtgctgcataatacagtatcccattgtgcctggcacactacatacagcagccataataaatatttcctgataggcaaaaagaatggaacataacaattcaacaatacatcctcccagaaagatgtttttattctatttttctgaatggcagagttcactttctcatccctacttagaatagctaaaatgtgccattcataattactacaatttttttttgtttaaaaaaatcctaccagccttgccaatatggtgaaaccccgtctccactaaaaatacaaaaattagccggacgtggtggccagtgcctgtaatcccagctacttgggaggctgaggggggagaatcgtttgaacatgggaggcggaagttgcagtgagttaagatggtgccactgcactccagcctgggcaacagagtgagactccatctcaaaaaacaaacaaacaaacaaaatcctagacaatgtatggattgtgtataaagtgggggagattatgtgcatatgttagagcaactgagacaacttcaacttggagatcaatcatcaagccttcaaccactgcccctggattcttttccttagagcactttgtgtgtagatatcatgtttcagccttttcactttcagaatcttggaatccgccaggaagtttccctgctccattttagttaattccttgttacaataggatataccaggacctctgtgttgatatgtctggaatctgggctttcccatttcaccttatgagaagccaccagtctcaagctttagccagttagaggagaacttaattcctcttgtcagctgccattttggtttgcttctcctcctttttctgacttgaaagtcacttcctgtgttaactggattcttcatgggttattctgtggtttctagtcttgttggataaactgtatccgtagctacttagtagtaaatgattaagtctcaggactcatagtagggtttagctgggcaaaagattgataagctcaattttttttttttattggtaagatgccaaacaaatatactctaactggtttgggaatagaatgactcatttggaaaattatctggagagcattgtgagcctcttatagcatctcattgttaagtgagactaagacacaagaactggaaaggattttaatgaatgtgaggtctaaccatgttgttttataggtggaaggctcacagagaagaaagtgtatcaacctcagtcaagcaaatctctttcagcaatttaagaaatgattttgtaatggaaataatattttaaaatattatttatttgtttttatcttataccacaaacattgcatttccaggcaaccattgtaccattttccccaggaaaagcaagaggaaaagaaatttacctcagaaaacaggaggataaaatataggcaaaaccatcacaggataggaaaaagtggaaatcacgtgtttttctggctcagaatggattgagataaggaaaagaggatgctctcatgctgggaggtgtgcatgggtccttcctatctcttctgaggctcaagccttggatgtaggttgagattcgggaaatagacacctcccaagctgcttcaaccaacattgagacttccatagcaaagtgatagtagcataacaatggagggaagagaaacacaaagttagagatacggagatgcagagaaagagaagggtagagagggaaaggggttgcattattattcccaagtgacactaaaatcttgtatggtagaatgaatcaaactatttacccatgcctcatgatggaagaggagaaaggtagctgagattccatctagggggtttaccagggtgggatacattactctgcaactgagggctatgttatatggttcccagagcagggcacactggaatcaggtatgtccagccctccaaacagccattgtgaggtcaagtcagaatctgtgtccagacaaagtaggaaaatagcccataagttagcagccccagcttttccatcagatcctgataaaatgaccaatgaccagaggggcacagtgcattgctgcagggcacaggggagcctaaaacatgtaagaacccaaggctgccttcttccgctctccccagtacccagaatctatctcaggaatgatcaggaggagaagagagaaattggaaagacagcattatccaaaagagcatgaatttcctatagagattattttcatcattgcataggacaaagctgactggatttaactaaatgtagcacccctgatccacccacccacctacctgaggggatgaggggatttctaaaatgtgtgtgaggctagcatagaagataaaggaggcacacttttctttgcacatctcagtgtggtgtgagaacacttacactacaattatccagttacaatttttcagaactgagctttctatccagctcaaattcactctggtgctaaaagtggctgcttactcaaaggcataactttttgatgaagcttactgatgggccacagagctctcatgggtgccaagaaataaataaaagggtcattgattcagtattttttgtgaatgacccactctatccttgccatgaataatggggcatgatgaacaattgaatgaagtcttctcttccttagcacctggaagctcatattgaaggaaaactcaaagttacccttctgccataatgtcaccttcttcataagccatgacaacaagtaccatagcattgttctttagttagggaagaatttaaagatgatctaatccaatcttttcacctcaaaggtggggaaacaggctttgtgagacaaggtggtttgcctgaagccacaaagaaagttagtggcaaaagcaaggccagaactcatgcctctcaatccctggttctctctgctagtctgcactacatttttcagcctccctgtgtataaaagaccacacccaaaagtaaaaaccatctggtctacatgattgaagcatttgccaatggtagccgggaggctaagccctgatggttcctgggcactctggaagctctctgacctctgagactcagtcccatatacttttcccttgagcattggcatatccaaaccttgatgtccccagaagcagcagcagcagcagcacagtcacctgggactagcaaaattccaggaaaacactgacatgtggatggcaggattcacagtgttctctgtcttctgtaacgcaatccacaggatgccaaaaagacaaatgcatttttctcctccaaattattcctcctacaaatgctaagtatctccatctgggaggcatttaacatttcaaacagctattgctgatctgtaggaggactcgccaagcatcaactgtctccccaaaataactccccttattgctgcatgagccgccaagatcaagcccaggcaggagaagaaaaatagtgtgtttgggaaagctcaaaaattagaggagagcaaggtcagccagctctcctgacctgtgtccaccaagtcttctctcttcagaagtatgctttgatgagacaaggtggagatgtcattgcatccccctcctggaagaatgtatttccaggaagaatttcattcatcaatttctaccctccccccccactcagatgatggtctcatgtttctcctgacactttaagttcattcggatacttatagtaaatcacacacatttcctggtaggccaagttaaaacacatcccataaaaaatggcaggaatggaaatatttgagttcctaataagatccaagagcttgtctttaccatatctccttctgttcaaatttgccaaatccagccatggaagaaatgaacaaagggctgacatctccaaggcactaatcctgcatgtgtccataataagtctattattaatttattgtctataatgtggtcactgggaggaggaccaggatagaggagacacatagtctctgacatcacagagtatatcaattaatggggaggggcatgtaaaaatatgtccatgaataacactaagtctgggtagaatgtgggaaattgataaagaactgtagtagttggaagagggggaagtcactgatggccgagaggccaggggagttttcctggagtagaaggcattcattctagaactttaaggatggaggttaggatttgaacatatggaaatgagttgagaaaagggcatctcagatgcatggaacagcttaagcaaaggcaaggaatgcaaggttgtaaaggtgtccagagatgaatttcatttattcattcttcattgattgaaagtggtatatatttgccaagcacaaagtatgtctagaacacagagctaggaattggacctactgagatacataaaaaatgactacgaagagctttggtctggtcggtgaatcagagagggcaagaagaaagtagaatatagggtgtcaagaacagtaacaaaaggaccttaggagactgtgagaaaaaggaggatgggcatttgacccaggcttcctgtgggagaggagagagcagaatcagatgccccaaatggaagaagaccatttgaagaagttttggcaggtgcactgctctgtggttgcagactagaagacaacaccccagctagggggtggcaaaagaacagaccccaataaaggtgtttgaatgtatttggttagcacggggagttcctcaagtcattcctctatttatactgctacgatggaaatagagttgattcacaccaccaccgggagttctgctggcagcccgtgatgggtgggaaggtgtaactctgaaaatgtgcaaaactactgtctaacacttgtttgtcagtgttcagattccattttgtgctgttggttttcttttctcaatgtgttggtctcggtggccaatgacctcatcaagggcagggactaagccctctgaacagctagctctgggctgagctacgtagtagatgctcagtgtgcatttggtgaccaattgctattgtcgtgtgtgtgtgtgtgtgtgtgtgtgtaagtgaaggggtgctagatgtttaattgtgtgggggctgagatatgggcttgttcttatattaatgagagtaaaatatttctccagattttaccatcattgctgattcttttttaatgtgctcaattctttgctctcttcggtaggaataacattttaccagtcagaaagataaatttttgaaagaagacaattctaggtaatatatatatatatatttatatgtggtcagcatcaatgaccagccacctaaacacctgtcacctgatgttaaaaaaaaattgaaaagtatctattttaagtgttttaaaaatttagatatttggcaaatccctatcatttaaagaagaaatactgtttgtttatgttaaatatttaaaagcattaatgaatatgagaaagaaaatttaaataataaaaatctagtattactgttaatatattgatgagtatctttttatcttttatgcatatactaatgtgtaatttttagaaatgaagattgagtgcttatatactgatttatatgatgcattgaaaaataaattcatatgtagacattaaattcttttacataaacataattttaatagctgcatagtgtactcagaacttaagccttgagtagaaaacaaatattaatccaataattctacaaaaatataaaacttctgctatggcaagtgtgtcaaagaagatgatccagttaaaagtacacttggtagggggtttggcttgggggtcagaaaaagcttccacaaggagtgatgaatgatttgaaacctaaacaataattataagataatggctggttggggatgaggcaacaatgggatggggagggccttgcagtaaagacaacagtctacaaaatccaattgtcagcaagaggcctgttgagacacttctaacttctaaccaattttcactgctatttgtatgtatttagatggcctctggatattttattaaactcttgggtacttctaatcatttatcagttgaccttaccatgttttctagtaaagaaacaactgatatttctgagcctggaagcagttgtgaattcagacgctgccctgcatcaggcattgtgccaaggggtctctctgtgtctgcttatttttatttttatttttatttttattttttattttttatttttgggatggagtctcgctctgtcgcccaggctggagtgcagtgacgcgaactctgttcactgcaacctccgcctcccgggttcacgccattctcctgcctcagcctcctgagtagctgggactacaggcacccaccaccacgcccggctaattttttgtatttttaatagagatggggtttcaccatgtaagccaggatggtcttgatctcctgacctcgtgatccgcccacctcggcctcccaaagtgctgggattacaggcgtgagccaccgtgcccagcctgtgtctgcttatttaatcctcactgtccttttaccattcctcatgcagaagaaactgacttactgatttaccaaaatagggctcaactactggagagggaggcagccaaaatccaagcccaggtcaaatggcaatgcctgtgcttccaagctggtggtaaactaaagtttagttttcctccttgtcttcttcagtatctaaaactgttgaaaagcaagacctctgttttgtccatgactttaacaggagcatttctggtattttacagttcagtaaagtgtcagctgttgatacatgagaactattctttacaatgttagcgaaatactcctctattccaagatttctgcattttaaagactaaataagagatggtattgcattttgtcaaagaccttgtactatttgactatgatgtttctcctttgacccattggtgtgataaatgatgtgaatagatttctgaatactaaattatttctagtattaaatcatccttggtttcttggaataaaatctacttggttgtggtgaattatccttcaaaagcatagccgaattaggtttgcttgtattttatctagtgtgtttatagctatatcaatatgtaagattggatcagagcttcttccttctttggattttgttaggtcgcagcaacagactcatgccaacctcattagagaaatcaggacacattttttttcttcctaaattgttacctagcatgggaattatttatttttccaaattttgaaatattgaacatttagaataatttaggcctagtacttccttcagagatgatttttatatgacttattcaatttctcctaaacttttgatatactcaaattccaactgagtcaatatttataatttattttttaagaaagccataaatatccttaagattttcagagttatttagcatgaaattatatgtttagtatatatattcaattaccttgtaattactaatttctggcttttaccctcattcttcatattgagaggttatataaagtgttggttaggagcttaggtcattctgttactcaccgcttgggtgctcttgggcccattgtggtcctctctgtcttcctcaatttctttacttgtaaaatcaagacaataatagggccctccttgtttgtttgtttgttagtttatttggaaacagggtcttgctcagtcacccaggctggagtgcaggggcctgatcatggctcactgtatcctctacctcctagctcaagggattctcctgcctcaccctcctgagtagctgggattacagatgtacaccaccacatctggctaatgttttaaattttttgtagacacgggatctccctgtgttaaccaggctagtctcaaattcctgacctcaagtgatcctcccgcctcagcctcccaaagtgctgggattacaggtgagagccactacgcccagcctgtggtattgttaataacatacttaatcactgtgaggcacatactaagtgctcaataaacattagctattattctaacttctaaattgttaatatttctgtttacaaacaaaacaccatttagatttatatattaactatacagattatttgcttttctaattattgggattttaaaatccgccctttatttattccttatgcttttcttagtttttacttgctccctttgaagaaaattcattgctgtgctttcctcagtgaatttcattttttcttgtttaataaaggctgaaattgtggattatcacatttttgtatattgtttttctcagatcattaatttctaagtaatctataaccaatattttaattttctctttgactaccatgttatttaggagacagattttcaatttgaaagatctggaaattatttttagctttttgaaattttggatgggtttttgatttatttactttttagattttgaagtgttttctaatatggatgcccacagaataccattttatatacatttcctatatatccttatacattagtattttctatatatgcccagagaacgtgacctgaactaccacttaccaaactttgttgttttgggtgtgtgtgacctaaaatgatatatattttggaaattgtattagtttatctcttacaagaagttcaattattttcttgatataatgtttaaaaatctattcagtcagcattaattatattatgcagatccactgcatccttatttatttttgtctacttaatctgtcaaaaactcttgagtgttaaaatctcacaccattgattgtgtttatgtcatttgtctcttgtattgctagtaattttagctctaggtgtttaatgatttcagcaagtaaacatttatgactgttgatttgccttgtgaattggatatttatcagtataaaacaatcctgttgttctattttaaggtattttgcttgaattctacagtgcctgacattcaattgctgcctctggcttgacttttgtttgtactggactggcacctgtttgcctcttcttttgcatttaacccaaatatgtgattttgttttaggcttagctaatgcaaacagtataaggtgggaatttaacttttgatccaatctcagagtctctgactttcaagtgggagcttaaaagatttacatttattgccataacacatttgtttgggtttacttacatcattttgttttccagctttttcagttttattaacaccccttcctccccattttttttttttttttttttactatagatggtgtaatattgaagtagtttaggccaggcacaatggctcatgcctgtaatcccagcactttgggaggctgaggcgggtggatcacctgaggtcgggagttcaagaccagcctgaccaacatggagaagccccatctgtgctaaaaatacaaaattagctgggcgtggtggcatatgcctgtaatcccagctacttgggaggctgaggcaggagaatcgcttgaacccagaacgcagagattgtggagagccaagatcacgccattacactccagcctgggcaacaaaacaagagcaaaactccatctaaaatatatatatatatatatatatgtatatgtagttcaaagtaaacctggatcaacttccagctctattgctaactagctgtggatgtgtgccagataacaaagagtacattttaagtcatattgattatagagagaggtgattttttagagctttgggtcagaattctcgtatgtaggtcttaggaagtcacagctatgacaaaaacaaaaaacaaaatagactatgttaccccataaagtcatgagttcacaattattagagacgtacaagaaaaaactggacatcagactgccctggagttgattcatattttgaatggaggctgtaactcattgttagcccgaatctttcagactctgagggtctgtaattacttgagaagtagcaacactgacaagatcctagtgtcttctaaatttgcagtctttccaacttcttagatgggaattctaattttgtatagaagtttcagaagaaaatcccccacctaaacatcccttctggatgtgtacacaagtctacatagacaccgttctcaaccgtggctgaatgttaggatcatctgggtgcttttaaaccaccactgtccagttcccacattcagggagtttgatttaacctttctgaagttgaagcccagatagcagccatccttttttttttttttttagctcccaggtgattttaatctgcaaccagggttaagaatgactgacaaaaaacattgccgttgattttcagctgggcaaacatggcaaacaactgtgctttgcctctggtgcattcatttttttcatcttctggttacagcttcctagtttgtttgggaatccaccacttccactttctttttcatttttaattattttgaatatgtaatagttgtacatagctttacatgtttatgaggtatttgtgatattgtaatacagtcagatagtgtgtaatgatgacatcagggttattgggatatccatcactctagacatttatcatttccattttctttgttttttgagatggaatctcgctctgttgcccaggctggagtgcaatggcataatctcggctcactgcaacttccacctcccgggttcaagcagttctcctgccttagcctcccgagtagctgggattacaggtgcccatcaccaagcctggctaattttttttttttttttttttttgcatttttagtagaggtggggtttcgccatgttggccaggcaggttttgaactcctgacctcaggtgattcgccacctcggcctcccaaagtgctgggattacaggcgtgagccatcgcgcctagcccatttccattttctatcccacacagtttgggaagggttgactccaggattctggatggaaaaggactctcaggcttcaatcagcacccgcattccccaggccaatcaaatagcctcaggactttgggtgaagcgcctgcattttagctggactttaacctaggggaaggctggagaagctgggagcacctaggatcctaagaacaaagcttgcatggcaaaagatagggttaaaagatgcagaagtaagtgagagctaaataatgtgtacacatggacgtagagtatggaacaatagacattggagacttggaaaggtgagagagtggaagtggggagggtgacgatcaattacctcatgggtacaatgtacagtatttgggtgatggacatgctaaaaaccaagagttcactactagacaatatgtgtgtgtaacaaaattgcacttgtaccccttaaatgtataccacataaaataattattgatattttaaaaaagaaagtgaatcttcatgacatcatttgagtcatgaatttagttctatttactatggtcatctttatctccattttacagatgagataactgaggctcaatgaggttaggttagtgatgtgatttggctgtgtccccacccaaatgtcatcttgaattgtggctcccataattccgacatgttgtggaagggacccagtgggagataattgaatcatgggaggtggttttcctcgtattgttctcatggcagtgaatgagcctcacaatctgatgattttataaggggaaacccctttcacttggttctcattctctcttgcctgctgccgtgtaagatgtgccttttgccttccaccatgattctgaggcctccccaggcacgtggaactgtgattccattaaacctcttttttttaaaatataaattacccagccttggatatgtctttatcagcagcatgaaaaaggactaatacagttagttgccccaaattccacagcccgttagtagaagagacttactccatgaaggtcttatttgaaaagttggaatttgtgttctaccccactgctgcaacaagtaaacatgccatcatcctccatccatcagtctcccttctccctctgttaaactgaataattatgaattttcaaactgagtttgagcctgtcaaggagattttatgcccttgggacaaaacttgtgttctatgtgaccagaactttacctccatttctcagagtaattcaaggtttttgtttgtttgttactcatttttaacaagagagtcctaacgattatagaaatgctaattccatgtccctgaaattgccccgctcctggagtttctctttgggtgtattcttgctggttcccaaaatgttaagcgcatagtaaagagtaaagaaggaaaagaatgcggtgagaagatgaagaagagagagcgagccaagagaccatcaaatgtggatggcagttcttttaagactatgtgctttaggctcttttaagagcttccctgagccatctcaagagagtctcaaaataaccctgctggttgtaggtagagtggggaaactaggacataataacatgtatggagccctcactgtgtaactaagtgacagggacagaatttgatttcccagcgtaggtgctttctgtcacactgcatggctgcaaaatatttctcaccctatcactgttctaataagcttttctaataagcagaatcattatgaattttaagactataagagttatctgttgtttgggtgactataagaatttctgttctttgggtgatgtttatcagcctaatcttgaaactactctgaaatggcagacagaattgttccctaggactgggagctatgagtcaagcccagatatttctttaaacagaaaaacatagttaggctgggtgtggtggctcacacctgtaatcccagaactttgggagaccgagacgggaggatcacatgaggtccggagtttgagaccagcctggccaacatggtgaaaccccatctctactaaaaatacaaaaagcaagttgtggtggcaggcgcttgtaatcccactactcaggaggctgaggcaggagaattgcttgaacctgggaggtggaggttgtagtgagctgagattgcaccactgcactccagcctgggcaacagagcaagactatgtcaaaagagagagagagagagagacagggagggagacaaggaaggaaggaaggaagaagggagggcgggagggagggggagggagagagagagggagagggagagggacagggcagatacaaagggatatatccatattctgtccctacaggctctttgctgggctcatctggtattctacactgatagcatcatgctatgatgatcctaatcatagcccccttcggggcagttgttattaaaagtcaaagaggcaagccaaagtggtaacatgtcatattttacaaaccaatttagttaacctgagtagtcatggggaactctactcaactagccggtcagtggaacagtggaataccatgtttagccaaggatgagagaaaattggagttggacccaggaggctgagtctcagttcccagcagagagactgctcaccttcttaggtctaattgcagccatcagtttaatccgtaaagaattatgtccaattggtttcggtctgtctgcatttataaatgtcattctgcccagcatgtgttttaaagattagctgtacttcatcgttttgttagcatgaatcaataatgtgggattcttggctcactgaatttttaaagtcatctgtgaatcagtgtaggctatttgtgcagcaccctctataacatgctaattttatattattggataaaatgcctagttttggaagatggttatagaaaattttaagattcacttaaaggttagctgaagctatagaagagagaagtgatgttattttgctgatactgacatgtgcatggattttattcttaggaaaggggtaaaattaaattatcaaagttaatggtaggttctaaacagaagtatggccaggaaaatgcaaaacaaaagtcgctatatggaacctccatgatggaaccttcacaatatctgtcagtgatttaaaaatgcctcccttggaagatgttgcagtggtgctggaaattacatcctatgtggaaaacaagggaagtgcaatgcatttcctgaaaattgtactataaaggaggttcatctttcccaaagtaagagaaaagcaagttgtacttatgctgtaatcccataggtggtttactactttttttcccatggcagaaaattcacagccatattacttgatgtcttgggttttaatacagccaaactctttgtaagcctgtggaaatgggtgttgatataatgttgttataaatcagtcaaagacgaactaaataaatattcagcttcattagttataagaagggacaatttaagaaatgaaccactttacctatgaaattagtaaatactgaagaaaatatgaaagctgctgaagattgggtgatttactgctagaaggttgtaagttattgcaatcttctgagaagctatttgataaaaagtatctggttgctgaaacagattttaccctttgaacctagtaaatccagttcaaagttatagacaaatatttttgcttaaatatgcttattgttgtgttaattcaaataacaaaaattgtagaaacctatctacctaacaaagtgaatgattaaaatagttataatcagctgggtgcagtggctcatgcctctaatcccagcactttgggaggccaaagtgggaacatcttgaggtcaggagatccagaccatcctgaccaacatggtgaaactgcatctctactaaaaatacaaaaattagctgggcgtggtggcgtgtgcctgtagtcctagctactcaggaggctgaggcaagagaatcgcttgaacccgggaggcggagcttgcagtgagctgagactgcaccactgcactccagcctgggcgatagagcgagactctgtctcaaaaaattaaaaatgaaaaataaaaaaaaataaaaaaataaaaagttgtaatctctccctatgataagttgtcctgaattcataaaacagaatgtttgcaaagaagttttaatttcctggagaaatgcttaaatataacactagatgataaaaggaaagaaaattatttgcattatttcatctcacctatgtaaaaaatatctttttggaaagatgctggaagtaaatttactgagatgttaagtcactaattcaacaaacatttgttatcagacactgttttaagggcttgggatagaaagaggaagagcaataaagaaaataaaacacaatgatatactggaatagaatcagcagtgagggtgagggtggagggcttcagatgatgtatcatggaagccttcctgaggaggtgatatttaagctgatccgaagatggggggcgggggggaaatgtaaagatctggttgatagaaagggaaaatgtaaagatctggttgaagagtgtgccaggtagagggatgagcaagtgtcaaggcaaggagagttaggtgtgctctagaaatataacaaattgctggagcctgatgagtggccaagtaggtaaagtgcaaaaaaagtagatattggagactaaaatcaggcatttaaatccatatacatgcagcagaaagccactggagggctttgagctggggagcagactaatgtgatttatattttgaaaaacaccactgtagatgcccttggaaatgtaatgtagaagtcaagagtggaaacagagaaatcagttaagtggtttttgcatgtttcctttgattccataatcttctggtaatttataatgcagatataatggcatgtatgagaatagtatatacaagagcattgcagtatcatttgaaatagaaaaatattggaaacaacccaattgtcaaaggatagattaccagtgaaataaatgttgtcacagccacatgatggaatgctaagcaactaaagagaatgttctcttcaacatctatgtgggaagatctccaagatgtagggcaaagtgaaaggagcaagaaacagaatagaatgcgtgatgttttaacaattctgtaaaaacacaggaggaatggacattttgtatttccataaagactcttgaaggagtctttaaaaatgaagtgaaaatttggttacctgtgaagtgtaaaggtgggaccagagcaatgggggatggaggtgtatatattttgatgtggttagatttttttttttttttgaggcagggtcttgctctgtcacccaggctggagtgcagtggcgcgacctcagctcactgcaacctccgcctcccaggttcaagagattctcctgcctcagcctcccaagtagttgggactacaggtgcatgccaccccatccagctatttttttttgtatttttagtagagatggggtttcaccatgttagccaggatggtctcgatctcctgacctcaagtgatccacctgccacggactcccaaagtgctgggattacaggcgtgagccaccgttcccggccaatatggttaaatttttgaatatgtgtactacctactcaatcaaagctcaaattggaaaaacgaggcttcctaaaaatcctgggaagagagggtggagatgctagggtagtggcatgggagatggaaagaagtggatgacattggggtatattttgtaggttaagtctgtggaacttgattggaggattggttgtgaaccatgaggggaaataaaagatgattcctaggattttggtttgagaaactaagttgtggcattttctgagttggggaagactagggtaggaggtgattttggggggaacgtcaaaagtactttttaattttgtgatgtttgagattataagacatccaagtagtgactggagagacaattgaatgattgcctggagatatatacaattgcctcaacctggagataaaaacttagcaagcatcaacatatggatggtttttaaagccatgggaatggatgagattgctcactggaagaggagtagagttggaaaagtgaaggcttcccaaaactgagccctgggacaaagtattttaaggggagtggaagagaaaggtccaggaaaaggactgagaatctgggccatgaagttaggaggaaaactaggattttgtggtgacacaatggtaaagagaaaaaaagtaagtagtttaagaagaagggagtagttattgatgtcagatttgctgggaactaaaacaagtgctcaaagaagcaaccataggatttgttaatgggatgatcactgttgattttgacttggtccatttcggggggtggtggtgatttgaggaaataatataaaatggaaggtgtaaacctagaaaaaaggactaaaaaccactcattcaaggaacttctccttgaaaaggaggaaatgaatgagaaagttattcgaggtttggatgtgatggccaagagtcttgtgtcttctctgtaagatgagaaatcctgaggcatatttgtgtgccagtgagaaaatggcatagtagaaagactggagatgatggttcaggagagggaaaggtacctgtgggggccaagacaaaccaagttgtggagaagatgaagaaagactggagccagagccggtagtgcaattggtctttgtaggagcccaggtgttcttatgttgttgatgtggctgtcactgaaagttcatgtgaatgggactgttcttgcctcagttttcctcatctgaaaaatagggaatatgtaatacatagctcacaagatgaagtcaataatgatgcctgaaaagtagcatgctctcagtaaatactaattatttttgttgttttcattctgtgtgtttcccaaatgttctatactaagcatttgctaaataatgttaacatgtatattaatgcccattttatagtccctggccaatatgagtaatggaaaagcataatccttagcacttgaagactttttcagcaccaaggacagcaaaacgtcatcgtaatcagcacccataagcatccaccttaggattgcctaggggccggccgctctcataaatacataaaggggaggaaggaacaaatgtagcaagccttagattgagccctgcgggaaattctacttcccatttgcaaagaacaaggctgggttctttcttcacgatgtctctgccacctgcacacagtgctagtattgtgtgtgacgtttctctgtatctcttgggaactcattgtgtttgttggggcttagagaaaagcgagggaaagtggggaaaatcagaatcggtttttcagaggcaggcttagaggacacctgcaaggcagggagaatggcagattacattgggatgcaacgtgggcctgagttctgaatatgttgactttatctattaataacgcatttcattaggaacaggggctattgatgtacctggcaaataaaatgcattcttcacaggcagccttgctcttcaatagtttcttaagcagaggaagaagcagcaatgcttgacagctgtttttcttactaaaaattgcccatttatggctctggggaagggggatcagaaacagagtggagaagagaaagtctcttgggctcctgggagaaggtctctaagtctcactgggctcctgttttgagccaggcacttcacatagtttagctcatttaatcctctcatctacttttaaggtagggatcagccctattagtgcaaaggagaaagatctgagaggttttgcaacttacccagggtcacacagctaataagtaggcaattaacatttgaactcaaggctttcttcctgcgtttagctcctgttcctctatatcagggttttctcaatctttgcactactgacattttgagctggatgactcgtgtgtgtgtgtgtgtgtgtgtgtgtgtgtgtgtaagaggtgtgctttcctgtgcattgtaggctatttagcattattccaggtagaataccatcacctcccatccccagttgtggtcaccaaaattaactctggacattgccaaatgacccctgtggtacaaaatttccccagggtgagaaccactggctcatatcatgctgcctaaagaatgattccacagctcacagccccgcaggagctttctagattgtggtcatagatcatatttgtgtgtgccatgttcattcattcttttgtgcattcactccttcatacaccccatcaatagttactgcatgtctaagccaggcgctgtgctacatactggggaaaggcaatgaatggtgcatagtctctgctcttggggcatgtggtctgaggggcagacagacacacacagcagcagctcagggagtacaatgacagcaacacctctgagaagagagatgtatcccaggctaggttgggtcttagagaaagaaaaattcacttggtatatacagaatccactgattgacttaaaagataagcttatcttaggggtttttgcttagggattattctgagttcttggtgaatgaatccttagtgatccagctggcaggatttgtttttttaaagattgtatatacatagagcaaagtgcacatttttaaaatgtaaagcataatgaattttcacatgttacatccatagaacctccattcaaggtcaagaaacagaacacttctatcaccccagaagttttcctcccttaataatcagtagagccttgcccacaacagtaaacactattcaacttctagcacaatagaatggttttacctgttcttgaactttatataaatggaattctacagtatgtgttcttttgtttctgccttatttttctcatcattatatttgcaagattcatccacactgttgcatgaagctgtacttcacttttttttactgctgcacaaaattctattgaataaatattgccttaatttatttatccattttcctattgttgaacatttaggtttcttgcaattttgcctgtgttaataaagcagtcataaacacattcatcaatatctttggatgaacataaacacttctttcacttgagtatatgcctaggagtggaactgctagatcatagggaggtgtacgcttagccttaggagacattgcaaggattttttcccaatttatacccccaccacaagctcatgggagttttggttgctgtcaggcatcagaaagcatcacaggctaacatcatgcataagtaaggcaggaattgtaacctcaaggctgtagacagcaggggtgatgttgggaagaagaaggatggcatcacttctgtcccactggcctaacctctgtcacagtccccatatttggccacctgagctctggggagagcttaatgggctagccccacaagtgaagagctggaggaagctgcttccctgtccatgttgatgaataacagatgttggtgaataacagctagtaccatggggtttaagagagaaatcaggctgggcgcagtggctcatgcctgtaatcccagcactttgggaggccgaggtgggcagatcacttgagatcaggaatttgagaccagcctggccaacatggtgaaacctcgtctctactaaaaatacaaaaattagctgggtgtggtggcaggcacctgtaatcccagctactcggaaggccgaggcaggagaatcgcttgaacccaggaggcggaggttgcagtgagccaagattacaccactgctctccagtctggatgacagagtgagaccctgttaaaaaaaaaaaaaaaagagagggagagagagagagagagaaatcaggaaaattcaccagcccaacttctttcctgcctataagaaacagatctgaatttggtcatctaatgcagccaagacacaaaactcttggaggttccatgatgttgtgcaaagaactctgaggttcctgcctcagttccttatgggaccaaggagaaacaccttgctcacctcccagggttgttgagaaagcaaatgataatatatacataaataatagtgtgtgcatgaagagatggctgtgtttttcaaggttgtggtctggtcctcctggcatctggtcacagggggtgacagtcagggaaatgctgtacattgatggaaagaatatgcagtaatagtcaggaccacccccgatcacttaccactgggtggactggcttactcacttcacctttctggtcttcggtgtccccatctgtgaaattatgtcttggaccagaacatcgctgatggtattccccaggagactctgggcaagtgagagtgtaaataacctcaaacaagtcattatttactcagaccctattagagacagcaatgttggctaacttctactgagtgcctggaactttcctaagcattttacatgcatcttatcttataaggaaggcattattattctcattctactgatgcagaaactgaggcccagagaaattaaataaaatttacctgaagtctcatagctagtaagtagaggcagtatctcagcccaggcagactgatttctgagccaagttattaaggctgtgatatcccagaggcttgcctcaggggttctaccgtatgggaaggaagggagtttacagaaacagtttaggaatcagacgtaccaccttgccatttactagctgtgtgctcttaagcaggtgccttaagcccactccgtttctccaacgttcatatgggagtgatattttctatctcacacggataatatgtaggagtaacatggtgcccaagacaacacgaaataactgttagttcctctttctctatcactatgtaagtcaggagagaaatgaagaatggtcgttggaaatgacctaacctcccatctcctcgccatgagagaatgttcttggaataatgccaagctaaaagctgaaatgcaatgtaacatgactgtgtggaaagaaaatacccttccagtatgcttgtttttctttaatagatgagatcatattgggtataaagttttgcagtttgctcttctcactaaataatgtgacataagcatttccctgtgataatgacaatctctttgtaatcatcattaaatgctgggtaatgtttcattatatctatcatgatttacttacttccataatgtttctaaatttctcactattatagaaacactaaaatgaccatgattttagccataaaaactttattcgaatttcaagccatttccctaaggcatggacatttaaaaattcttctgataggcactgccaaattgctttcccaaaatgtttaaccgagttatacccccaccaagagaataggatttttcatcgcactcatgctaacaatgagaattatgagatctagaatctttgttaatttgattattaatcaattttcatctcattatttaaatttacggttctttgatccaaaatattgttgattattgattcaaattacctcatggtttaaatttttctttatgtctgtattttttgtttttcagttttattttgacacatatcaaaataaatatgtgtacgtataatttaaataataattagtaaatattaatctatgtaccactcagctaaggaaatagagcacttctgtaccttagaaatctcctggatatctctcttaactattttcctcccgccttctggtgtagctacagttctgacatttgtggtcattgttttcttgattttttagttttaatacatattcatgcatctgtaagcaacgaagtttatcttgtatgtttgtgaacttacataaatggcacagtgctataagtattcttctgtgatttacttcacccaaaattgttattaagattcgtgcatgttaatgtttatactaaaatttatcctgttccctgcttcatagtattccattgtatgcacatgtttctccagtagaattactggtgtttacagtttcatctttatttggtaatacattgggttttaagctcattttaatatatattgtaaatctgccttccagattacttgattcgtaatcatctctcttaccattagaaattatttttattctaatatataattttttctttcataactttttcattgcctcaatatttagaaagttattggtcacccttaaatcataacattttcctcatatttttctgttttgctgttcttttcctttctgtctttgaatattggtgtgtatgtttaaccctttgcacaacttgggattgattttgctttacagcaagaagcgaaaatgtttgtttttgctcagttaccagctcactgccttctgtagcattatcaaataaatcctctttgccaaacatggtctgtcaaatctcagccctatgcctgtccttatgtctattccactctacaccacagcggggaacctgaaaactatatttccagagttccttggcggctgggtatgggtcgatggtgaccagtggggtcgatcacatgagattcacaaatgggaaaagtgtagaaactgtttttctgcttctggcgacagcatcagcagtattgtaaactcttgacttcttgataatacctcttttcatcatccagctctagagaatgtactggcttcctacaggtgttaatccctgggcaatctctactttgctcctcttatttttctacacatttgtaatcaattccctgtattaaagtccctactgtttgaaatacctagagtgatttatgttttcccaagggtacattaattgatctgatggatgaatcttcctcttcctattgatttacagtgctgaacttattgtgtacatgtgtgtgcccatgtatgtgcgtgcaggtgtagaagaaagaagggatagaaagaaagaatgtgtactatttgttttggagctatatatgttagttcattgatccttttgccaattcttgcccatacatatttatcattacaattattgtacctaaagtgtgcatttcggtatctgacagtacaaatctgccctcatccttcttttctcatatggtcttcactatcctcatctacttatcaagctgtgtttttaagaagaaaagtcttaagaccaagcatggtggctcacacctgtaatcccagcactttgggaggctgaggcgggcagatcacttgaggtaaggagttagagaccagcctggccaacatggtgaaaccccatctctactaaaaatacaaaaattagccaggcttggtggtgtgcacctgtaatcccagctactcaggaggctgaggcaggagaattgcttgaacccaggaggcaaaggttgcagtgagccgagatcacaccattgcactccagcctgggcaacaagagcgaaactccgtcttaaaaaattaaaaaaaaaaagaaaaagaaaaagaaaaaagtctttgaaggagaactgattgtgctctagtataacctttttctctgcatctcgctgaagctgagggtattgcataagagaagctgacattgcttcacagtggagactcacagaaacagtcacacgccatgtctccccatcatgtgggcacagtgggtggttgtgtctgggtgcacaggtgataaatgattgccattcagaatgtctcttccttaccactttgggatcaccctgtttggagaagaggctgcagaattgtcctccctaacaatgaaaggggatcttgcttcctgtgagtcatcctaacaatgcccaaggtcagaagagaaatttcctgcaagaccttgcaatttctcagtaatcctatttgggctcattggatgaaatggctgtgggaaaatgatctgatcattattgtaaacatcagggcaatcatgtcaggagatgcctctgaaacacacaccatctctgcttcggtaactactgaaagggaggggattggggaaggtgctcatagttctctcttttttttttttgtcagagaagactttcatgatattctgaaaacacccctaagatctcccctctgggctctcctcgtgcttttctgtgaagcctggtttggttgaagacaaagactgcccccactttggaagtcccaaccctggggaagcctctggcagtttcccccggtgcggttggctttgtgtataagaccgctttggaacttgaaagcactcatcgtgaccctcagggctcggtgccccgggagtcaggcccactgagagtgagtagcagtgaagctatttcagagggaacacagggactgtgccaggctgtcctggcagggaaagctgagtaaagggcagcatgactttgtgcagaattggagcagagtggaaacagccccccacctcccaccaccgtaagctttagagtcatactgcgtgggcttgaattctggccgctctgcctccagttggcaggtgctttctgtgcctcaattccctcctctgtacaatgttagaaataacaatgactgtgttaaaggctagacacaattaaatgaggcaatccatttaaaaactaaaaatagtgcctgcatgtaataaacacaccatccccattcctcacccgactcctgacattaattcattaggttaattgcctaaactttggagtcagactgcccagttcatatcctgattcagccagttcctagctgtgtgatgttcagtgagttgcctaacctctctgagcctcacttatttgtaatctagatttcataacagtacccccttatagcattgctgtgaggatttaatgaattaattcacagtaaactgaagacaagtgtggcccccaagggacatttgctaatgtctgcagatgttttggttgcaaaattggtgtgtgtattttcggcatatgggttgaggtcgatgctgctaaacattttccaaggcacaggacaaccccctacaacaaagaattcccatttcaaacgtctcaagtgccaaggttggaaagcccttataggccaatttcatggctcaaggtgagccctgactattgttatttgagcaacagcgctgtgcccttatgccatgtcaggagctgcactgtatgctgggaatataaagatggatgacatgaagccctgccctgaagtggctcagtctagagggaaatgctttgggattggggcagggaatgggaggcaggaagcttggtctctgacaaccagccagagaagttaatcagaggaagacttctttttctttcactgcccctctaattgtagaacaggccaagcttctggtgggataccaggcaaattagttattgcaacaatttgatggctgcccttctggaaggaggtgcaggattctatggaggcacatggcaaggtctccattccagttggaggaggtgaggacagacgtcttctcaaaggagggtacgcttgttgctgcctcatgaagggtgagtaggggtaaggacaatgaacatggggcaggtgcagggcagaggaaacctcacagagagaggtttctatgtattccagaaatgtttattgagcacctaatgtgtgccaggtgcagttctaggcactgggaatacggcaatgaaccaaatgcaaaaaatctgtgccctcatggagcttagagtgtaaaggtggggcctgcctctacaatcaggcatgaccgacaagcaaacacataggcagtgaggcaggtggtgacaagtcctttaaggaaaatcagggaaagaggagagaaagtgcttgagagggtggcagtattaaataagaaactcatgaaaggcctccatgagggcatgatctttgagcaacaacttgaagcacgtgaaggagggagccgtatggatatctgtgttcgaaacaaggggaacagctcatgcaaaggccctgaggcaggaccctccctggcacgtctgaggatcaacaggaagatgaatggggaggaggggaattggacggcagtgggagccatagccaggtcaagaaacatcttggatgccatggtaaagtgggtggatcatcttctctcagccagcagggaaataaccagacatcttctgtgagacacggccctgtctgaagcacatgatactttctcagaccaaacaggctgtcttctgggtagctgtgtccgttgaatgcctctctgattactcaacacaaatactattacccattgcctgcaagatatgtttaatacaggaggattcttttttgtacccaatcctggcaaagttttgtggtggcaactgagccctgagtttcaatccccatgacatggctttgggtacaacactcttgattctctgggtctcagattcctgacttaaggtatgaggagactcagcaatcactagctaacttccttttcagctccgggattctacaaatgcctcaaagttcttcatggatgcctggataacagttgctaaaatgtggagcattaactatatgctagcattgaactaagcattttacatttgtttttattcagtaaaacttcatcaacaccctgggatagaagtagtgttagctccactttatttattttttttcatttgttttgttttgttttgttttgagatgagatctcactctgttgccaaggctggagtgaagagggtgatcatagctcacctcagtcttgaaatcctgggctcaggtgatcctcctgccttagcctccccagtatctgggattacaggtgcacaccactatacccagctaatttttgttttattttatttttttgtagagacaggatcttgctgtgttgcccaggctggtctcaaacgcctaggctcaaggacctttccacctcagctccactttagagatgagaaaacagaggcacagcggggctaagaatatgctttaaagttgcatggcttgtatgtaacagatggacccagctaggtctgactgcaaagcccattctctgtgggctcgatgagtgtgaataggaaagacgacatcagaatggggcttccaagtatgtgtagctcaccaggggaggaggatgcaggcattctgtttctcctgtctctgccttcacacctgttctgctgatgtacctgaggggctgggaagactcagacagggtccctggggccattccagcaaggtcacagttagagagctaagttgttgaataagggctgaagttttatcaattacttccccatgaggcagctttgagcagcaggtcagaggcttattcatggggctgcgtggagcatcccagacccctgtggagggtcaggtagaaccagacgtcagtcccagacactgggagactcaaacaagatgggaaacacaggctgacacgttcgccttaccgctcagagttgcctggcaactgcaactgacaagctgccaactcgttgatacaatcacagcaggaagatcagagtaagccaattaaaacttttttttttttgcatttttcgttttttgttcccataatttcatttaatcctgactgccctcaaacatggattaagaagcctgccagaggagagtggaactcgcacatatgacacagcccatttccccctgcacagtcagaaaatatgctcgtcacgtgccagccatggaacggaaggtaatttaattaaaatgtaggcttgtctacctattttacttagctccactgtgaaatttaaaatttgcctggagttaggaccaaatctgatttttattactgtatcttagtgctttcctgccaccaatgttagcgtggaggacaatgcctggcacatagcaggtgctcaataaatgcttgaacaaataaatgcatgaatgaaacagacgctggggagaatggtaaagctaactcacataggtgagcttgtctttaagaaagatagttctaaaaccataggtatctaaagtgaaaaataagcacctcctttacctaagatctttccatggcacctcaaggacccagaggctcaaactgcctaaagttcacacagggatttggtgagagagcctggcattgaccaggattttttcaaccctaaacccatgcacattccatgtgtttcacgcaaaaattcatgtacctgtgagcagagtccaagtctccgcatctcattaacctacatcccccacagaggtgacactttggaaaggaagtaaatgatcaatgtggtcaaattacacacttttgggatccttcagaagagatatgttatcttgctctctgagtggtgagacagggaacagtcagagaattgtaaaactagactcacataggtgagtctaatgacaatgatttattggatgataaataaaaccttcattatcattcactagattttcatttatctttttccatgttttcaccccctaccccctcagcttctggatggattttaagcagcaaattacaggcggtggctcaggcctgtaatcccagcactttgggaggccgaggcggcggatcatgaggtcaggagatcaagaccatcctggctaacacggtgaaaccccgtctctactataaaataaaaataaaaaaaattagcagggcgcagtggcgggcgcctgtagtcccagctactagggaggctgaggcaggagaatggcgtgaacccaggaggcggagcttgcagtgagccaagattgcgccactgcactccagcccgggcgacagaacgagactccgtctcaaaaaaaaaaaaaaaaaaaaaaaaaagcagcaatagaagaagtcaactttagacatgaagagtgtatgaggagtcaggaagaaggctaatttcctacgctgcactaattctctcccacttctctgagctctgcgttgcttctgattcctgatacatttttgccccgatgttgcagctctctaggtattctctctctgctctgactgttccttgtctcaccattcagagagcaagacaacatatctcttctgaaggattacaaaggtgtgtaatttgaccacgtagataatttacttcctttccaaagcgtcacctttgtggggatgtgggttaatgagatgcacagacttggaccctgctcacagatacatgaagttttgcatgaaacacgtggaatgtgcattggtctaggacagaaaaaatcctggtctatgccaggctctctcaccaaatccctgtgtgaacttcaggaagtttggagcatccgggtccttgaggtgcccgttggaaggtcttagataaaggaggtgcttccttttagctttagatacctatggttttagaattgtctttcttaatttcttcaaatcattattattgtttcccttctcccagagtcaatttaaacatttattcctaatcatcccccaatgagaaaaaaaagtttttttttttgagagagtctcactttgctacccaggctggagtacaatggcccaatcctggctcactgcaacctctgcctcccagactcaagcaattctcatgcctcagcctccctagttgctgggactacaggcatgtgccaccatgcccggttaatttgtgtgtgtgtgtgtgtgtgtgtgtgtgtgtgtgtgtgtatgtgttttagtagagacggggtttcatcgtgttgcccaggctggtctcaaactcctgagctcgggcaatccacccacctcagcctcccaaagtgctaggattagaggcatgagccactgtgcctggcctccccatgaaatttttaaaaccagagatacactgggtgtatctgttaatgcgctgtatgtatatctgtgctttatacataaaaagaataagattgtttttcaccctgtccccaaaagagccaattttcacccccttgggggcaagataagctctttggagaattcatgttgcaggaaaaaggcctctatcttttcctctgacttctggagctcagtaaaataaaaagccagtctgtagcctgtgctttaaaggacaagactcactgaagaaaaaagtaaataaacaaataaacaaagaatcaaaaactaacttctttggaatgaggtcactgtagcctttttatgacgttattttcagaattcagcatctaaactctcctggctagcattaccttcttttgtcttgagcgagctcaatctatgcattcatactccaggcacagaatctttgtggcttgagtgcagaaactaatgagagtgtgaaggttaattttatgtgtgaccttgactgtgccatggggtacccagatatgtagctagatattctatgtctatgaaggtgtttctggatgagattaacattgcaattggtagactgagtaaattagataaagccctgcccattgtggatgggccctatccaatcagttggaggcctgaataggacaaaaaggaagaaaaagaattctctctctctgcctgtttttgagctgcgatatctgtcttctcctgtgcctgaactggaacttacaccaccagctctctggggtctctagcttcccagtggcagattgtggaacttctcaacctttataatcatgtgtgccagttccttattgtaaatctcccacaagaaagaaagaaagagagagagagagaggagagagagagagaaagaaagaagaaaggaaggaaagaaagaaaagaaagaaagaatgaaagaaagaaagaaggaaagaaagaaagaaaaagaaagaaagaaagatagacgtaacttactggttctgcttttctggagaaccttggctaatataagaccttggggacagaggatagagagcttggtggaacaacatcatgtaggcttgtaaatgactgttgtagcagacatatattttgccccttccaaatctcctccaatcccttttaatagctctgtgcatacctccgccagctttgctgctaatggctggcacatgtgaccttctacagaagatcgctctgggtctattggaaccacctcacctatcctgagaactgagttggcaccccctggaatatcccatagcagttaacctgctggtggggagcacaagtccctagtttccttgtcttgaggcagaacaaactcaggtgcaatttatgctccaccgctccctctggggtcaggctgagggtagaacatggcctgaagtcacattcttccttaccttctccttctctaaccagatctcttggaagcacttccttcatcaatcacatgcaccaaagtctttcctacctgtcctataggaagttaccagtttcacataaccaaaaggagaaggaacttttctctggatatcaccaaatggtagcctaacactaggctatgcaaatataccatcaggatgctcaatttatatttgttttgtactgtcgaatttacaacacctttgtctaaaaattattttgtggactcaatgatgcttttgtgttcttactggttttcagaggcattgtgtgaaataaggtagtttctaactgtctcaggacttaaaatatgctgaccttccatggattgtaaatatgtttttaaaatttcattttccatcacatgaatttacttatcacctctccccatcctcaagatctgcttcagggagaagttgaccaagcacaatcatagtaaagagttggactttcttctacgaaaagcgggaaaccactgagtggtttttgtgtgtgtgtgtgtgtgtttgttgttgttgttgttttgagatggagtctcactctgttgcccaggctggagtgcagtggcgcaatcttggctcactgcaacctctacctcccgggtttaagcgattcttctgcctcagcctcctgagtagctgggattacaggcacgtgccaccacacccagctaatttttgtatttttagtagagatgggattttaccatattggccaggctggtctcgatctcctgaccttgcaatccacctgccttggcctcccaaagtgttggaattacaggcgtgagccactgtgcccagcccattcagtgtttttaatccaagagataaaatgcttatattggaaaactccaccccttagtactagtcatagattaattgcatcattgtttttgctgagctagtcttcttccccctctctggagtgagtggaaagacccctggaatttttccaatccccagaagccagttgagtccctgcatacttggtttcatatgtatctatgaccttaagtggcccactcctagacctccatctagtctacttcattcattcaacaagtatttatggactgcctactatgcattaagcactgcctcctatcaatctagtcttttgactttttgaagtcccaagctccctactgtcagatgtgtctcctagatctgggccacccatgattctttcagtgttgtgtttgactatgtatactaatagcatgtaaaacagagttttgacaaggagtttccacaaacacccacggtgaaccttgcaggtgcgtcaaaaagattttacatcactttcacaccttgtgattggttgtcctataggaaggtgccagtttcatgtaatcaataccagaaagaacttttttctggatatcaccaaagagtagcctaacaataggctatgcaaatatgctctcaggatgctcaatttatatttgtttagtactatcaaataaacaacacttctgtctaaaaattgttttgtggaccccttgatttttttgttgttgttcttattggttttcaaaggcattgtgtgaaataaggaagtttctaactgtcccaggacttaaaatattttggccttccatgaattgtaaatatgtttttaaaatttcattttccatcacatgaatttacttatcccctctccctgtccttgcctcattattctgaaatgatgcaatagtgacccataataaatatttcctcaccaaacattagctctttcccattcaaccctgatttatcttggcatatcaccctcctgcataatgatttaggaatgtgcagattctgtcttagtcattgctcttctgccttcgtgctggtagcttcttgtttttcagggaagagcaaagcattagaatgacaagccattctgacaagagttgacaaatatctatcaggaccatggggagagtgaaatctttttgacaactccattatttttctttatctccaagtttttaggggggcaatctttccttcaggaggatcaaactctcccctccttctcttgctctacctgggagaaaaggaaaaacgtgatttgtaaagatctttcaagatatgacttttttttttttttacaagtctttgcaatacacaatctaaaagagaaaaatcctgtgttagctatcataattgtggaaagctgtgtatgtccacaaataaggtggccccaaatgcatggtgatcatcattttctctactagaagattcttcaccctttaaaaatttttaaccaatgtacatttttacagttgtgagacattgataacattgcttcatatctagtgatcatagtaagtttgttgtttagttacacatacatttgaaattatatacagaattataatgtatatataaggcttcttttcttgcatttcagtaaatcattcaaatttttccatgcattttctatatgattttctctggcataacagggggacacttttgagtcattttcctgactcaaaaccaggaaactgacattggtacaattcctcccacaattttcctgagcatgctaatttcactttcatccgaagtacatgagaactagcaatttttgagttcacaagaaattgtattccaacccgcaagtactaatttgcacaactttaggacaccttttcttttattgtaaaacataacgaaatagctgggcatggtggctcatgcctgtaatcccagcactttggggaggctgaggcaggtggagcacttgaggtcaggagttcaagaccagcctggccaacatgatgaaaccccgtctctactaaaaatacaaaaattagctgtgcatggtggcacacaactctagtcccagctacttggtgactgaggcatgaaaattgtttgaacccaggaggcagaggtttcagtgagctgagatcgtgccactgcaccccagcctaggtcacagagtgagactccgactcaataataataataataataataaaatacaaagatatccacaacacatgtgaatggctcaatgtataattataaagcaaacacaactgtcataaccacccagaaaaagaaatagcatatttccaggtcctcaaaagatcaaaactcattcttttccctggaggaaacattatcttaaattttgtgataagaaaagtatgaacagctttttttttaaattatttaaagtctgggatacatgtgcagaaagtgcaggtttgttatataggtatacacgtgccatggtggtttgctgcacccatcaacacgtcatctacattacgtatttctcctaaatgtatccctcctctagccccccacccccgacaggccctggtgtatgatattcccctcctgtgtccatgtgttctcattgttcaactctcacttacgagtgagaatatgtggtatttggttttctgttcctgtgttagtttgctgagaatgatggtttccagcttcatccatgtccctgaaaaggacatgaactcatccttttttatggctgcatagtatttcatggtgtatatgtgccacattttctttttccagtctatcattgatgggcatttgggttggttccaagtctttgctattgtgaacagtgctgcagtaaacatatgtgtgcatgtgcctttatagtagaatgatttataatcatttgggcatatacccagtaatgggattgctggggcaaatggtattactggttctagatctttgaggaatagccacactgtcttccacaatggttgaactaatttacactcccaccaactgtgtaaaagcattcctatttctccacatcctctccagcatctgttgttttctgactttttaatgatcaccattctaactggcatgaggtggtatttcattgtggttttgatttgcatttctctaatgaccagtgatgatgagctttttttcatatgatgaacagctttttaaaaaaacatctgttctgtgtacatctgcttattgactacaaaatacaagctcttagtctgtttcattttcaagtagctttacaggtttcatttatcatggtaaccaacacttgcagtggtaaggccatactcccaggaataattactaaatgtgttaaatttacctgcttctttgtttactgattctgtcgtgggacctctataaacatccaaagctagcattgattgaggtcgtttcagaataatgtgttttctcccaaagtaccttgttctttaaagtaaagtaattggcaaatgtgtcccataatttgagcgactataaaaggaatgtgtagaaggtgactcacacttctctgaagtctaattttgagccagtatcttccaccgtatgtggacctatgtggcgtttcttttttgatttaaattttcattaatagtaatgcatctcaaatatgaaaagtaaaaagaatatagcatgcacccatgttctcgacaatatccaggtgtcacccatgatgttgttgtataatcatttatgaaaacaagcaacaaaaacttcaaaggggtggttacctttctgatattttgtaggtgttagcttcagttgcaccatgtacattattctgaaacataccttttcattactcagtatactgtttttgatatttagccatattgttaaatgaagatctagttccttcttgttaaatgctatagaatcatctgttatagacatatagtatacttacagtgtatactataatttacttattcatttccctactggtggacatttagatcaatttggttcccatattatattgatgaaaatttgcaagtatatagacaaatgtcaagagttgtacactgaacaaccatataccctcaacccagattctttaacattttgctatatgtgccttattactccatatatctccatccttttgtccatttatccatccatccatcttattttttgctgctttgcaaagtaagttgctatgtcttactatcaaatgtaatgttagagatggaaaacaaaaattccaggaattaggtgatgttcggaattagggagatgattgagactgtacagggatgccatgagagaaatctccgtggtgctggaatagctccccatcttggttttaaataattgtggtggcggtttcatgaatctgaacatgtgatcaaatgacctaaaattatatacatgcacattgtagcaatgtcagtttcctggttctgacattgtttcaaagttgtggaaggtgcaaccattgagagaaactgggtgattggtatacaagacctctttgtactatctttgcaacttcctgggaacctacaattatttcaaaattaaaataaaacaatagcagcaataatgagatcatttgaagcccctgcacttgttaaggtagggaagttgtgatcaggaagtgagcaaatataaataaatgggtctaaaagccaactgtggcaaagcagagaaataggataaatctgagatcttgagatcattattgagtcaggaaattaaacaactcttctcgacctcttatgggaagtaatacatttttctctgtgtgtaggcaacagtattcttactgaaataagcatgaaagaaaccaattttttagcttcttagagcaaaacttttaaaagaaaatcaaattttacaatgaatagcattgtatatgtctttgtgtatagatgtgagtttttctagaaacccatctaggaatcaaatggctggatccaaaagggtgaacatcttcaaatttactacttattttatgaaacctaacaggccatctaatgtaagttgcacccaaaatgttgtttaaaatattaagaaagcagcaactgtaagatggatttggatttaggcaatgttaaaatgtggcagtgggggacagtacgtgtggaggtggaggaggaacgtcttagaaccaacgtaacaaagcagataactccacattcctttacaaaatggttgtataaatttctactcccaccagctgtatcaaaacatgaattttccacatccttatgaagaaactttgataattcaatggctatgagatgattttaaaaactgcatttccctaagcaccttttcaaaatgtttatggaagatttgtgttccttcaggtatgaattgctattcacaagcgttgcccatttttctactcagttttgtctttttccttactgactttaggaatttgttgtatattcagttttgtttactgcaaacatcatctttattctggattgttttcgtggatatttttaacattgttctaatagtctctctcaacaccagatccacactcttttatttaagttttataaccagtcttaacatcttacaggtgtttcatctttgttcttcttattcaaaattgttttggctgttcttggcttcaacatgtctttgtgaattttcgggtctgcttgtcaagtgttatgaaaaatgatctgcttgaattttgattgaagtattggttgtatagatcaatctggagcatttccatctttatcatagtgcttttttccatgaacctggtgttcctctccaaatgatcttcatttctatcctttaattaaatgttatatttgtccctataacgacaggtctttcaatacatttatcctataaaagcttattttctgtttgctattatgaataagacattaaaatgatgttttctaacttattgttgatagtgttcaaatatgctaattttatttgactttgtattcataatgttttttttaaaaaatgatagtttgccctagatagtcttgattttcacatatagacagtcatatcaagtgcaaatttgcttcaaatgttaagaatttctcctactattcctagtttgctaacatttttcttttaacacatgaatgaatgtgaaattttactgaatgttttttctgtctacatgaagatggttatttttcaacttgaatctggtacataataacttacattaatagattttctaatgttatactgtctgtacattcctagaacaaactctatttggttatggttatctgtttgtttctattcacactgctagatttttgtttaccaatattttgtttaaaacttttgcacataaatctataaatgagattgacataacttttcttgcctgtctttgatataaaggctatattttattacaaaatcaactcctccattcctccttttccaatcctttaaaaatgtttataagaaataggattatttgttccttgaaatttatagattttgccaaaaaaataccaaatggccctgataattgttttgttctcttcttattcctgttatttacgttccactaaactgtgctcatttaaaagactcttctttttttcaatttactgtttattttttaatatcccaaggtaaatgtttaaatcatattgtatctttattcctggctaatatatctacttaaggttacacatttcccttcaagtacttcataaatagaatatcttaagtgttgacattcattcattcatttattcagcatgcccctactgaaacaaggttagatctgtatatatgctgtgggtagtacaatgaacatagctcctcgacttcatgaagcttgcattcatatgaggaaaggcaaaaaacgcacaaataaattacgtcagatagtatatgaattattcagaagcatgtttttaaaactgcaaatatatagtgagtttttcacatagctatcaaattgtttaaaaggagttgtcttagttcattttgtgctgccataacagaatacctgagactgtgtaattcgtaaagaacagagacttacttctcacagttctggaggctgggaagtccaggatcaaggcgctggcaagtttggtgtctggtctttctgctcaagatgacacctgaaatcctgcattctctggagggggaaaatattattcctcatgtggcagaagagcgcagaggcaaagggagctgaacttggccatttattatggctttaatccactcatcagggctctgctctcatgacttaattatttcctaaaggcctcacctcccaacatgatcacattgaggattacgtttcaacttatgaattttagaggggacccaaacattcaaaccatagaaggggttttacttttattttcctatatggttttagaatgtggcccaaattctattgatacttgctttatggccaatatatggtcaaattttgtaaatattccatatgcgatgggagaaagtatgtgttctaaatcttgggtgcagggttgttaacattttgcttgattcagtttatttctgcttctcctctaacagaggagagattaacccatgccctgactctgtgggatgccttcaaaaacttcattgctttattagtttcctaagacagagtaaatggcatattgagctaaaccaggagagaaaatactgggtacatgtagcaccacgtccatgccttcatctgtggtagacattactaatcagttatggagattaacccagccgtcctgacaatcatttatcaatcagagttggcgtgtgtaataaaaccttttgacagaagtgtctgctttaggggaagaccacttgatagtttgccctggaaattttgactttttcttgaaacttctttaaaatatatctggtaggtatatcagaaaaactgtggattttcttatgcaagagttagcattttaaaaagtgaatagatgtcctaacgtatcacccatggcggacattactgaactttttcaccacattttctcatcctgtctgaacccagcctcagaattttctcaccacagcgtgccagacaacactacccatttatttgacttgacatgtgagatgaaacctttgatcatccctgaattactgggctttgatttgaataatatgctccctcttcatctgtgcaactttcatccttaaaatcaatggtgaccgatttcctctgaagtaaaaatggggacatagtcttatagaatattcaaaatcttgaagaatttactccttctctccgtaagtaatattccagaaagggatattaagtcacggtgctggaaaggaaatctcagttgtgtactagaaacaaccaaagacagcaaagtctaatttctaaggatgaggtttgaaaaaagaacaaaatgcaacttagcacagaagaagaaacacatgctttcagttctcagtggtgaggttggtaatctgaaacagatattaaagggcataagacatctggaaatcagaatttctgagactaagttaggagcacaccaatttgctgggtctgaattagagaaaaaatttttttctccacagaaagaagctgaaggacaaaaatgggtatgaagaagcatcgctttatggctcaggaacagggatctctcagacaggctggctgagcactggcttcagggttaacctttcccttttaggcagttttcacatcagagcatcctggcttggcttctagaacttcgttaggtaataaaagacagaaggaagggtgaagggaacactggactcatttgggaagaggaaatgaaggcgtgcaggatcaatgatcaccttgactcagtacttaagaaagaccacatcaaaaagacatgatatagttgcagtttttcatcaaggaagagtgaagatcaaaggttactggggataatcattcagtgaaaggggcactgcttgaaaaacgggagctgaattaaaggaaaaaaaatctacatccacatcaacctcaggccatcaagagaggcgggaggcaaaaaatacaacctctttccttagaaccttcgtagtgcaaccagaacagaaaatctccatagtccggtctcagaattagatttatgcgtgggcccccttcttctgtttctagtttctccatatttcatgatgtatttttgagaaaaaaatacttttaatgatgccaacttgcctcctttcagcacattaaaaaaggaaacgattggctgaggctgtcatgatgatgggaataattttgtcgctgtgcaatttggctcctgctctaacgtgaagcgcacattttcctccaatgtattttaagccagagacttctaagtaaatgggaggtggctgattttatttctgtatgcagccagccttcactggcacgagctctgatttggcccaatcaattttgcattcatgctgagaagcgagttgatcaagttcaaagaacatctgtatgcatttatctggatagggtgcacacatcggagccagtcctttgaaaggtccctcagccctccagagacgggcacaagattcctagacaatgacctttgtaactctggcaactgcattccatcctttaacaactgcaaggtctcttgaacatgccaccatctttgtaatttatagggttgttttaaagagtctagctctggcaagtttgagagtttattaagtaaatcttcattagctggtgaaatggcctccaaaaagttacccaactgaatgtgcaagtgtcagaatgtcaacccatacattagcacaccatttccacagttacatctgtcttggtcttcccccttctttttatttcccctttccttgcagtcataaatttcatgtgccaggagctctatgactcaaagaaggttgtaaacatccttttgttcaattacagcaggatttttcctccttatgtcagcatttaaatttatgagggaaaaaagttcactctctaaaactaaagagacacagccaagctcaaagtaaataaaaagagaacacaatcaacaacttacagttaagtataaacgaggcagtgatctcagaatcaaaagatgtggcttcaaatcccaatgccaacaatggctattgcccaggctggagtgcagtggtgtgatcttggctcgctggaacctccgcctcctgggttcaagcgattctcctgcctcagcctcctgagtagctgggattacaggtgtgtgccaccacatccggctaattttcgtatttttagtagagttggggtttcgccatgttggccaggctggtcttgaactcctgacctcaggtgatccacccacctcggcctcccaaagtgctgggattataggtgtgagccaccgcgccccagccctgagctatccttactcggcaggctgtagttgcctagtctctaatgtgggttgaatggttgcaatttcatagaatgttgggagaattcactgagatgtcatatgtgaagtgagtaccccccaaatggccagtccccttctcttttccttctccatgtgcatagggtgggcaagctgattgagtacagggcctatgttgtatatatctgtattttcccaggacctggaacatagtagatgcttagaaaatatttaacggaaggatgagagaataagccaattaatgagaggcattgggttgcattttcactcttgggcttgataacttaggtcttaggatgatgaaagtgatcttgcggattggggccagactatgccaatggcggtcaatggaatagcagcatggggagatggtgggaaatgcagaatcccaggctcctccccagtcctattgagtcagagtctgccttttaacaagatcacagtgatttgtgtgtgctttaaagctggaacatctctggattagagcgcttgattgagatggagagtgtgagctggtttcccacatcagccaatttgattggctctgctgactgcacatcaacttcaccttgcatttggtctttcaggaagctctgtgtgttaacatggataaatcagggcaaacaaattccttttcactgtgagatgggagaaacaaccctgttcatggcagggcagtactgccatgtgtctaccttcacctactgtatagtaacatcctcttaagtggaacatcgacatccagatctagtaataaccactttttatatgtagcccttgcagcaacccatttggcagctgaggctctggaaggtttggtcagttgcctgagaccactcaggtggtaactgagagctgagattcaagctcagaggggtctgattttaaagggccctctctcaatagctctgctacctaccctcccagccagccctgcactcagctgccgggtgcctttccaacagcacagctgggagagatctacaaagcagcggatgcttttccactggtgcatcagcattgcagaaggcagacgctcaacccctgcagtgcctagttggaagaggcgcacctccttcctctgacctggtacccttttttgctttatctcctgctgtcctcctttgcacattccatgcctcagcactttcctgaggagcctaggctgtctcctgcctctgcatttgctcaaaccactccttccacctaaggggcccttttctccacttgcccaccaggctaacaaatgcatgtaagcatttaagagtctccctgaagtcctcaagtagaactgaattctttctcctcagatctctccatcaaaacaggcttcacactctaaaaaaagatgatttcatgggtgcagcacaccaacatggcacatgtatgcatatgtaacaaacctgcacgttgtgcacatgtaccctaaaacttaaagtataataataataaaatttaaaaaaaaaagattatttctttctctcttctctactgacatgcgagcttgaagaccaagaccctgtgaggtagtatgctatcagcacagtgtggaagccagacccaccagggatcaaatcccaaaggctggccaggcgaggtggctcatgcttgtaatcccagcgctttgggagggcgaggcagcgggtcacgaggtcaggagatcaagaccatcctggctaacacagtgaaaccccgtctctactaaaaatacaaaaaattagctaggcgtggtggcacgcacctgtagtcccagctgctcgggaggctgaggcaggagaattgcttgaacccaagaggtggaggttgcagtgagccaagattgcaccaccgtactccagcctaggcaacagagcaagactccatttaaaaaaaaaaatcccaaaggttgcatgattttgagcaagataacacataactctctgtgcctcagtttcctcttctgcaaaatggagataatgcatagctacctctctggaattttttaaatgagtatggaatgaatgaacacatgtaaagcatttggaatcatgcctgatacatagtaggttttatctaagtgtttgttccataaaatgttgtttctatcttcacatctcagtcacctacacagcaaacattcagaaagtaatttttcaaatgaatgaataaatacatgagttctttgggggctgcctttattggttaacttttgaaactttaagaatggaaaaacgtttgcaaaaatattctctggtttctcaatatttctaatctcttcccacaaatctttttcttgtacaagaacctaccttttcatcccttcaatttctctccctggttgttgattaatgatggtatcagtgtgttctaaccagaatctctcacattttcctaagtctgtatacaaacatgcaatctggggagattctcccttatttgggtaatgtcagccctggcctacgcatccagggtggatggaggcgagaacggagccgccaactccagcggctcctgaaataatcgcctggctctgctggcgtgcacacaggtatctcgctccactgaacagctggcctttatttctgtccatgtgcctctcttttcattttgaagggaagacaacctgtcaaaccaaacccggagagcctggctggctgcaaggatctgaaagggcagagtttttatttttctttgctttctcatggttttctgaggaaacacaaaactatcttagtgtttggaaagaggcaatatagcatagtgattaagtagtttggaggcagacacacctggtttgaaacccaaatctgtgacttattagctatgcaatgctgggtgagagacagaaactctatgaggctcgggttttgttttttcttagttttttgtttcttttcctaaaccataaaatggttcttatgattaaaaaaaaaaaaagttaaggctgggttagtgactcatgcctgtaatctgggcactttgggaggccaaggccgaaagatcatttgagcccaggagtttgagaccatccggggtgatatagttagaccctgattctataaaacattttaaaaaaaatagccaggcatggtggtgcatgcctgtggtcccaactacttgaaaggctgaggtgggaggaccacttgagcctggaaggtccagtgaaccatgattgtgccactgcactccagcccagcctgggccacagagtgagactctgtctcaaaaaaagtattttaattaaaaaaatctcataaactaattcattcaaaatacttagcactgtgccttacgcatagtcaatcctattacaggtatatattacaggtatatacatatacatgtgtgtatatatatgtataggtgtgtgtgtgtgtgtgtgtatatatatatatatatatatatatatatatctcacatgtcctatttgatatcacttcctacaatcaattctcttttattcaaacaccttttgcatagaaagtgcacaatatgtatttgaacagatggatggtagatatataaattcatgaaagaaatttttttatgtgtgagatatttttattatatgtatataatatataatatataaaatatatatattacatatataaaagtatatatattacatatataaaaatatatatattatatataaatatatatatatcagtcaggataggctaagttttgctgcagtaacaaacaacccatattgctgtggcttagaggaaggtctatcagaagttactgaaggttctcctagctccaagatccaggcctatggaatgtctactttggagtgttgccagcgtggtagaggtaaaaagtagatggaaaaaaaaatcacacattggctggtaacatttccatttgtaagtgatatgttctatttctgctcatgcttcactggacaaaacaagtcacatgctcatgtctaacatcaaaagagtgaagaagtacaattctgtatgtgcccttaggaggatccaacatcatttgatagagtactaccttactaacctgttatactgttgtaaacatgagactcagacctatttctcattgtcatgactagatggtgtatagataaccaaccttatattaagtgtcctatgtataagtgcaggacacataacactgggaaaagagtgattaaaccataatgcccattcattgcattttctagggctgggggaatacgtaatagcattatagttatacaaaaagtatcatggctacatttccctatgcaacagggagcctgtttatagctcagatttcaaagaagaataacgaacccttctcacccaaacacaataaccagccctccctgagttccacagaagaatattaattctgcaggaaagactctaatgagaaacagtacagaggtgcggcagcaaagtacttgggtggcagggaggagaaccaaagagaggaagcaagagggaaagggaaagggagaaggggaggagaaggggttgcgagagagtgagctcaaatcttgcaacaaaatgcattggaagaaagcaagcatctgcactattatgggtaattcagaagcaaacttagggctttagaacagaagcaaaacataaccattccaacatatactaaaaccatatgggagccaccgaagatcacgcaaaccagaccaggataattcccttagccacactgaacgaataatccttgtcatgcccttagcaaagaactgaaggctgagatcaagttttggggtgcctgctctatccatatttccttctttggaagttccctacccatccctgatcctagagtgctatttctactgtagaatccatccttgtggccacagctgaatggatggagtgagtcatgtgatccaagatgaattactgcatagtctggactgaatcagtcagatttgttcttcacaaatctaatgtaaaagacataaagaaaatatgtaggctcttaatttgcaacttaggtagagttcattcattcattcatttatgaactaatgtttgttgaatgcccacttgcagaaacagcaccctcagatcctgacttcacagttttcattctcttgtggctgtccttaattttatatccccggttgtttacaagattgacaggagtgtacttcaactaattgaatggttcttattccacagcagggactctattatccttaattattttggcattttaagaaaatttaaaattaaaaaatttctccaggtattactctataaagacatcaacttgagaagctttcttctgattatttcagggcagggatccagaggagagaaaaatcaggacatcccactgcaactgccaacctccttatcgtattctgtcttcatggggcttgtttatgcctgggagttctatattccacatacaggaaagagttctgggctcgcatctcccttccctgtctattgcaaagcacatgcagacacaactgctggcagatgctttgggtatgtgagaaaagcacagagacagacgctaaatggcacttgtgcaaaactcactagagggaacaccccactacaattgtcatcagcttccaccccggattttcggagggagtcccaccttaaaaatagcctgtctctctgtccccacagggacttatttttggcagatcgcatgtctcaatttttggttgagaaaacactaccactttacatctaccgtaccctcaaatgtactctggagagggtcccgttccagctgatcattttcacggcggtgtgagaacttccatcttctgaagctgcatgagaataagtgactgaaggaaagaataaggggaggaggggagagcctaggctagggcactactcccattttcatgatctacaaattccaagaaatagtcaccctgcagtgacttctcataggatggttctctaaagaccctgaaattgccacctgattaaaacctcagtttccagccagggctatcagtgaaaagagcacatgtaatggttggaatcattaggtaatgctgtaggatgtttcttttgagttcctctgggttttggcacgtgatagatactcatgaaagggctgatgagttgactggaggtcaaagcataaaactgaacgtccgtcaatacagcaaacaccacacacagactccatccttgctttcctttgcctctctctgcttgagcatggccatccttgattcttgcctcttcctaccctcggctcttaactaagtttgtttttggacctctgtgaactgctggtcaatgaatcccattttgtagttgctgctctttggggtccaggttttaatacgaagaagtcaaaggtgattgtggatggaaagggaattctcattctatatatagagaacccgcaatgcagacggtctatggcttccgatgctgtgtttaagatgagcatttattttttaattcttcacttatttatttttgcatttatgcaaaatccaagggataagcatttatgaccaaggcatatagaaatatatgtgggggcatgtatagcaccccacatagggctatacgatcttctcccaggagcagccctcctggaaatttcagcccttcctccacccacatctcctcactgaaaggcaggtggggaaaatatgattaaggtgaattttcaacttcatttctgttgtctcatggagatctcctgcgctctcctattggatcttcagccttgaaggactcagatggtggtggaccttataacacatgcatccagagcttattaaaataattattttaatttaaaaaatgaaacatctttccaaacaataggaataaggattccctcccaggcatctttattagagtattgcccaaaccttgattgctgtcattccatcatcattcatttttgacatattgcatttcatagctgttaggaattagtcattttttaaaaatcatctcatttgattttttaaaaaatacgcttattttaaaaggaagctttgttgtgcatctctattttacttgaataaaaatttactttcattattaggaaggaaattttgattcaagactccacatgtcaaatcagttcccatgtcagtgtgacttgccattaatagatggaaagagagtaaaaataaacataatgatattttcacttatgttcatccaagttgaataagatctttaaaaagaattttctgtctctgtctcaggatgcctgagggtcttttccaccctctcccccgtcttcataagttgtaaggccacatatatatttaacaaacatctgtatagcactcactgggtgccaagtactgtttgaatggcttcacaaagaggaacatagttaatccttttaacaatgtaacaaagtggaatatattattgttactacccccattctacagatgagaaaattgacatacagaactgtgaggtgatttacatgagaccacacagctagtaggtggctgaattagacattttttttttttttttttgagacaaagtctcactctgttgcccaggctggaatgcagtggtgcaatctcagctcactgcaacctctccctcccaggttcaagtgattctcctgcctcagcctcctgagtagctgggactacaggcatgtgccaccacgcctggctaatttttgtatttttagtagagatggggtttcaccatattggccaggatggttctgaactcctgacctcaggtgatccgcgcgccttggcctcccaggctcaagcaattatcatgcctcagcctcctgagtaactgggactacaggcatgtgccactatacctggctatttttttttttttaatagagtctcactgtgctgcccaggctggttttgaactcctgggctcaatcgattctgctgcctcagcctcccaaagtgctgggattacagccgtgagccaccatgccctacttggattaagatttaaacccatgttatctggcagcagaatctgtgcttatcacatctgaagcccagattttggtttaaaaatgccaccccctgctgaaaggagcctcattctttggaggaatgatttactccgggtctgtggtagagatgtatgaagtgagcttgggtcatccaattgtttcagaaagcaaagatgtgtcaaaaatgatggaaatgtgtcaaaagagccccaaatccaggtttgtggggctcgcaatagccaaatttgggagaattttagtttgagaaatgacagaagttgtctgttatatgttgaatggctaaaatttctaagcctatagggacttttagaaagaagagggaaagaaaacgaaagaacttatttaagaattcttttttttttttttttgagacggagtctcactctgtcacccaggctggagtgcagtggctcgatatcggctcactgcaacctccacctccctggttcaagcaattcccctgcctcagcctcccgagtagctgggattacagatgcatgccaccatgcccggctaattttttttttgtatgtttagtagagacggggtttcaccatgttggccagactggtcacgaactcctgacctcgtgatctgccctcctcggcttcccaaagtgctgggattacaggtgtgagccaccgtgcccagccaagaattcttataccagctaatacagaaggagaaacagaaggaaagacagaaaaagtatcattttttaatttttagtttttgtgtgtacatagtagtgtatatatttatggggtacctaatgtattttgatacaggcatacaatgtgtaataatcacatcagggtaaatggggtatccatcacctcaagcatttgtcatttctctatgttacaaacattccaattagacccttttagttatttttaaaagttttaatgtataataaattactgtaatcacccggttgtgccatcaaatactaagtcttactcattttatttaactatatttttatacctattaatcatccccaccctctgccactacccttcccagcctgtggtaactattcttctcctctgtcttcatgagttcaattgttttaatgtttagcacccagaaatgggtggaaacatgcaaagtttgtctttctgtgcctagtgtatttcacttaacataatgtcctccagttccatccatgttgttgcaaatgacaggatctcattcttttttatggctgcgtagtactccattgtaaatatgtagcacattttcttcaacaattcatctgttgatgaacacttaggttgcttccaaatcttgtctattgtgaacagctccaaccaacatgggagtggggctatctctttgatatgctgatttcctttcttgtgaatatatacacctatcagtggtgaaaagtatcatttttaaacttgcagtttaataagtatttcaggcaggtgttagcaatagatgctataaccatttggagaaagattggtggagaaaagaggtgttgcctagttccaacctcaatcatggctatctttgtaaagtaaaggagggtaaagtgtgtcttcacaataggtgaccagctgtcaccgccttaaccaagtgacacacttttcttcattgatagcgtgacacccttatgttatttaccactgaatgtagtaatgtaatgccatatgaagtgcagagtgccctctaaaaaggttccttgctgaaaaggtaaagcataaatctaattcacgaaattaactagaatcgaacctcgatcatatcgaggctcaaattccagttcacagaaaatatgtgagacagagaaaaaagtgaaacgacaacatgggaaagcaatctggcaaatccagaatgtgggacattctgcaagacaactggactctacataaaatcagtgtaataaaaatgtagagggggttgtggcgggtccagattaaaagatgctacaacgacatagtaaatatatagtgcatggatcttgatcgaagtgtcacaagaatgcatttttgaaaatgtgttaaatgcattcttgggacaaatgaggaaatttgaatttggatattagatgatatagaattttcattttcttaggtgtgataattggtgttgtggttgtagaagggagaatgcctttttcctagaagacagaagtatttaggggtaatgaatcacgatgactgcaacttcacatagtgcagaaagaatatacacacatacatcaaacaggtatgatagagcattgctaacgaaatattagccattgaatctaggtgctatttattgcattacttttacaacttttctgaatatttgaaccttttcattatagccagttggagaaaagtaaaacagaacttgtgtttttttatggccctgtcctcctgcctggaattagagaagaggctgtgatcctgggagtccctaccctaaagtcacctcctttacccccttgtggtccccaggaggccatgcgtcagagacacattggaccaccgtgctccaacagatgaggaagtgtgtttgagctgcagagttgagatactgttctctcctcccagccctttctgctggagtggggaggccagcatgctcccctttgttatggaaacaccctggtttgctgcattgcgctcacccacccctgcagacttcagtgccttctgtagacaatggctgcagggttcttatgcccaccccaccctgtagctccagcctgtctacacagaaggttagaaagggattcagaatcatctggatcctgaagcctcctttttttctgaactgtcctcctttcttttcctttcctctgaagcacaaagaccagctgtgacattcatttgctgataatatgctgtaaatctgcctggcctgagacctgctgcaatgccagccgccgggtaagaggcgtgcaccgcagggctcttggaattggaagttaaggcctggtgtctgcagcccggatggctatcatgaatctttctatcagaacactttctctgagattaggctgcgtgccaccaagcatatgcctgcccctaacctgctctgtcggaatcgggctgagcatctttcctgagcctctgatgtctggcatttggaaatgtactgctggctctgccgaggacgatgggtcacaggagagctgacccggtcacagagggcaaccagcagccaacacggaccttccatccccagagaggcgcttcgccgtttctcctagttgcctcctgaactctgagctttcttcccagttgctaaagggcgcgcccacccgtgcctgttgttcagtagccaggaagtcctgtatgagatctaacctcaattggttgtgctgtagcttgactcaatttccttgcttttcttttgacttactttgcgcttgaagaattaaagtgtactgctttagacctttccttagagcaactaactcatctctatttgcctaggacttccctggttttaccactgaaaatcattcatctgtgaaaacctctcagccagccttccttccttccatccttccttccttccttcctttttccttccttccttccctccctccctttccccctccttcctttctttcctttttttctttcctccctccgtccctgcctccctccctttccctctccttcctccctcacttccatcctccctcccttcctccctccctccctcctttcatccttcctgcctcccaccatccgtccttcctttcctttcttcctttcctcccccctccctcccctccttccttcctctcttccttccttcctttgttgtgccacatcccaatcataatcatttccagctgttctatttttctcctcatccttcccacccaggagatggttgtcagtgtcagcaatggtgagtattttgtttactcaggcgggcagggtgctccatgcttttcatgcctcgtctcagtcagtcctcaccacatcctctgagggaggttcctcacctccatttacaggagaggaaaccaaggcagacacaggtcatggaccttacccaaggccatgcagctggagagtggaggtgttgagtttgcagcccagattagaggggtttgaccccagaactatctcacccaaccaacttcagacacggatcccaattgtctacgatttcgaagcgctagaccaggtccatgggcaagacccaaggaccggaagttaggggacctgcgttccagtcattctccatctccatgtggacgcagaaccaaaacctcaacacaactctccatctttgacattccctccagagctcttggtgccagccctgcctccactccccccaacttcttcccactcccaacaccacccagagccagtacctttcccagaagccccaggctgcttcctatggctgaacaagctgcttcctccaactggaacacctctttctctgtgctgatgtccacgaaagctcaagccctacaggccagggtaaaacaggccaactgcccagcctcttaccagcttgcacaggcttctacccttactagctctggagggccacagtcaaacagtcatggtgaaacctagccccttgcccaagtttcttactctctcatgcctcagtgttctcatctgtaaaatggggacgatgaagatgataatcatggcctagtccataaggaagcttgcaggaagagctaaacaagaggagataaaaagcaaggtaataacagttgcaaacactaatatagggctcactctgtgccaggcactctcccatgcacgttgcctttgttggctccttgaatccacactagaatccttgaaagcgttatcattcccagtttacagaagggggaattgggggcacagagaataagtgactggcccgagatctcctagctatggaggagtggcttggggatcggaacccacatgtgctggcttgagaggccaggctcttaatcactgtttagatggctgctaatgcttggcagcagatgaatgggggattgtgatcaggcattgtttcaagggaaggttactagggaaggcctctcagaggaggtgttgcctggtttgagactggatgatgatgaaaaggcaggtaggggatcatctagctcagcagaccttcgtcttagctgctcattactatcacctgaggacaggtttgaacgctgcaatgtctgaacttcagcccagagcaatgaaatttcaacctctgtgggtgagcccaggcctcagcatctttttttgtttgtttttgagagagtctcgctctgtcacccaggctggggtgcagtggcatgatctcagctcactgcaccctctgccctccgggttcaagcaattccctgcctcagcctccccagtagatgggattacaggcgccggccaccacactctgctaatttttgtatttttagtaaagatggggtttcaccatcttggtcaggctggtctggaactcctgaccttgtgatccacctgcctcggcctcccaaagcgctgggattacaggcatgagccactgtgcccggccccctcagccatttttttagcttcctaggagagtcccacatacaaccaagcttgagaacagctgatgtggggggctgggaagtggggagggaggcattgcaaggagcagggacaccccacctttccctgggaggagcaatccccccttcctgcctgtggcttcctattgttcccatagcgctgccctgatgagcaaacagagaaggagagaggaattaaagctccatttaagggaaaggttaagagcagctttcgctttcctaaattccagggaggacaggagggggctgagtcgatgcggccacccgtcaggcctccagatgacaaatgacattctgaaccagtatcttctcagatacttctaagctgacccttggagatagctaataaaagaccaacctgccctccaagattaacgactcccgagttagagggaaggagcgcgggcgaggggggctctggaatccttggctgcccccaagttcccaagccctctgcctgatggtgaggaggaggtggaggaacaaagagggctcggtgggaaacctcacggggatacaccatgcaagcccccagcctaggtggagctgcttctgccccgctgctgcgggcccacccagcccctccctcccagccccgcccctgccaaccagtctccctttggcactcagccacatctatgcccctccatttcttgcttttcttttttgaaatgtatttccgtcttgctgtgggtctctgcggtccccctgtgccactccatccatgccttctccagcttttcctccctgcctcctcctaactcactcttctctcatctttttatttccctgtctatgttttgctttgtctctctcagcctgtcttcccatctctgtccgtgtgtgtgcgtgcgtgcgtgtgtgtgacttatgtttcttgctctgtcttgccctgtcccccatcccacttattctttttgcttgtctctctgtctctgactctctgcatctctctctctgtatcagtctctctatctctgcatctcggtgtctctttccatttctgtctctgtgtctctgtctctttctctgtatctctctgtctctgtcttcatgttcctgcatttctatctctgtcttctgtctctgtgtttccatctctccgtgtttatctctgtgtctttctgtctctttgtctctgtcttcatgtctctgtgttcctgtgtctctgtctgtgtctctatctctctgtgtctctgtcttcctgcctctgtatttctgtgtctgtctccatgtctctgcctctgtctctctgtatctctattttcatgtgtctatgttcccgtgtctctctccctctgtttctgtctctgtgtctctgtctctctgtgtctctagcttcctgtctctatatctccatgtctgtgtctctgtctctgtgtctccatctctatatctttgtgtctctgtccctttatctcagtctgtgtttctgtgtctccgtctatctatgtctctgtctccatgtctcagtctctatgtctccatgtccatatctctgtctctgtgtcttctctgtgtctctgtctctgtgtcttggtctctgtgtctgtgtccctggcttcctgtgtgtctctgcccgcctcacccttgcggttccctgcccctggctctgtgcatggcctcctgtctgctcctttgctttctgttgtccctgcttccatctgtttccttcttggtccctgtctctctgtcctcagtctttcctgagtttgcaatgaactcacatctttgctctcctctccctccctccctgtctgcttctcctcatccttgccctcttaggagaggggcctcctctcaccttggcggtaatcagggaggcccggctggtgggggcggggaagggcagctggctggtcctgctcgcccaacaatgcctcaagtccaccttctgcctgttggggggccctgagtctgagctcatcctgctggttgagccctgcaggatccccattgcctccaacacagaagacccctcattccttacctccactttgccccgtcattgttagcaagagttcgtgtccacaactgagaaatcccaagtcaattgtgaagccacagacatacttatgaattaataactacagctaagatttactacttgcacatggcctgctgtgtattctgtgcatgcaactcatttccaccaaaatcctgcaacactgatatcatcatccccatttttcaggtgaggatgagagagagggtcagagaggttaagaaacctgcccaaggtcacacagctagcaaatgatagaggcagaattcaagcccaatctaggtgggcgtgaggatcatgccctttccactgagtctttcagcactgtgctatccaatgagatagctgctggccacccgaggctatttaaattaattaaaatgaaataaaattaaaaattgaatctctttgtcacactggccacatttcaagtactcaggagtcacatgtggttggagatgccctactgaatattacagacatagaacatttccatgaatgcagaaagttctactggacagcaatgttttcgataaacatggaggagtcttttgtgggagaacaaaagaaaacacaatgatatcaaaatagccctgggtcgctccctggtcccagccctggccatgtgtgaagtttcctagaagcctctggactgaaacagccatctctgtgtctgagtacctgccagtggtatcacctatgccatgcaaacctgcctttacgaccccgtttgtgtcggaacgactgcagaggaacacgatgctttcattagggagagaagaggggcagatgtgtacattcttctagaaggcagaaaaaacacaatcttatgccagaaattgaattttcttatttcagctggtgtccagggctttgaacccttccgcaacatgaacagcttatcttgttccactcgatcaaaaacatttcatagtgccggctccttccacaaggtcaccttgaaatcgtttccctcctcgaagcatcctgaatcttctttagcctaatagaaacattcttgaaatcggagtaaactggacttgttcaactctgctcccccactccaagaaaattgtatctcgcctctctgtaacgagtcacgaaaaagagggaaatatttacaatttcttgcaagctcaccaggctgggcaatcggaataccccagcatctgctggccccacctgctcccatcagtagtcttggcctcgtgcaaatgtctctgcaggcagctggggtctcagtggttcttccagggtttctcaagaatgagttctctcctttagctttcaggcatccctgagctactcttctaggcactagtcattcctgccatagagctctcttctgctggtggctctgcccccagcctgggctccaaagaatccctctagctttgatggttgccattgtaagcccaagctactctatggtgtaggacaaaacagagaattgttctctccccttcttgccttattttgatacccaattagaaatgatccagggcaatgctgcttggccctaatgacttatggcatttactggagtccttcttatgagttttatttttgtctaacattagaggagtatgtgtagtggttaagaatattaaaaacaggtctgggcacagtggctcacgcctgtaatcccagcactttgggaggctgaggcggatggatcatctcatgtcaggagttggagaccagcccgaacaacatggagaaacccagtctctactaaaaatacaaaattagctgggcatgatgggggggtgcctgtaatcccagctactcaggaggctgaggcaggagaatcgcttgaacccgggaggcggaggttgcagtgagccgaaatcacgccattgcgctccagcctgggcagcaaaagggaaaaactccatctcaaaaaaaaaaaaaaaaaaaaaaaagaatattaaaaacaggctaggcactgtggctcgcatctgtaatccaatcactttgggaggccgaggtgggaggatcacttgagcccaggagttggagaccagcctaggcaacatagtgagaccctgtctctactaaaaataaaaaaattagttgggcatggtggcgcaagcctgtaatcccagctactcagaaggctgaggcaggaggatcccttgagctcgagaggttgaagctacagtgagctgaaaaaaaaagaatattaaaaacaaattattaatgacatctgctaaagatgtctttagactttcaagaaagactattcaagggaagctactacaacggggttttgaagtaggggagaaatactgagtcccactccaaataaaatcagaaaacaggcaatttacaggcaaggagtgggatgtggggtggaggttggtgggtggaagctcactaagaaatagggtaattctttactaagctgacctaacagggtttcttttgaaggtggaccagggtgataagatactgagggtgggagattttcaataaactgactcaacaggattcttgctaaaagtgggcctggaataaggacaaagaccaaggtcaggacctgttcggacagaggtctctgagaagcctgactacagtcagatcaagttgagaatctttgtcaagagcacatgcaatgcagccaggtgacctcggtttgaattctagctctgtcactagctggttgggtgacctgaggttaagttacccaaaccctctgtgcttcagtttcttcctctttaaatcagggataataatattgaccttataagtatgaagactgaattagttggttttgcttttgttaatatcatctgtttgtgttctttggatacaaaaatgcccccaggagccaaatgcagtggctcatgtccataatcccagcactttgggaggccaaggcaggaggatcgcctgagcctgggagttcaagcccagcctgggcagcataatgagaccctatctctactaaaaataaaaaatttagctgggtgctgtggctcacacctgtggtcttggctactcaggaggctgaggtgggaggattgcttaaggagagcaaggatgcagtgagccatgatcttaccactgcactccagcctgggcaaaaaaagtgagaccctgactctaaaaattaaaattagaaataaaaaaaaaaaaaggctcctggcctggtttaaaccatccccatcactccatgctcaaaacctctcctcctcccccagagggctttgtccctggatatttgcattatctgaccttttttgccccatcttctagcaggcttttctagaccattcaagcccccagtacacttcctttctggctgccatctatcctgtttggctgaagccttcccattcaccccgaccatctgcaatccgcgtgtactttgcctttcttccagattttccagcctccatgcaaatccttactctgagatcctggaactcatcttctgccccaccctacaccacttcttgctgggctgtctacagggacacattcctgttgtttcagcccagcctcttccttgggacccagaataagcatggatccaccgtggacacaccgaggctcagaaacagctctcctgctcccagcctgaccccagcaggatggaatgaccagaccccctccttcctggcctccatcagtggataaagatgccacaggcatggacacaggagcccctcgattcccaagtgtactctgatagtacaaagtgctgacaatttcaaggagggttttctttttgttgttgttgttttttttttgttttttttgtttttttttgtttttttttaacagtaaactctaaatccctttccaggctgcagggactcatgactttttatttagtatgtgctctccctctcctttgtttcattggcttcagacttattatctcacatttgtctgcgttacattacctttttctctgaccgtctgagtcacccacaataacccaggccagaaccatcccaatctatttctgggtgtgtgcctgtgtgtataggtctattgttcctatcagagcagtttcagggatggggtggggtgaagacagtgccccaagtctcaggccaggttgcacttatggagggaggagacctgttattgcaggaacaatatttctgcctccagtttcctgatgtgtaaaatgggaatgatagttacctcatagagttattttgagccaaatcagtattcagaaccccgccctggcatgtaacaaatactatatcaatacaggctatcatcactgttgtttttttcttaaatattttttattatactttaagttctagggtacatgtgcacaacatgcaggtttgttacatatgtatacatgtgccatgttggtgtgctgcacccattaactcgtcatttacattcggtgtatctcctaatgctatccctcccccatccccccaccccacgacaggccccagtgtgtgatgctccccttcctgtgtccaagtgttctcattgttcaattcccacctgtgagagacaacatgcggtgtttggtttttgtccttgcgatagtttgctgagaatgatggtttccagcttcatccatgtccctactaaggacatgaactcatccttttttatggctgcatagtattccatggtgtgtatatatgtgtcacattttcttaatccagtctatcattgacagacatttgggttggttccaagtctttgctatcgtgaatagtgccacaacaaacatatgtgtgcatgtgtctttatagcagcatgatttgtaatcctttgggtatatacccagtaatgggatggctgggtcaaaaggtatttctagttctagatccctgaggaatcgccacactgtcttccacaatggttgaactagtttacagtcccaccaactgtgtaaaagtgttcctatttctccacatcctctccagcacctgttgtttcctgacattttactgattgccattctaactggtgtgagatggtatctcattgtggttttgatttgcatttctctgatggccagtgaagatgagcattttttcatgtgtctgttggcacataaatgtcttcttttgagaagtgtctgttcatgtccttcacccactttttgatggggttgtttgtttttgtcttgtaaatgtgtttgagttcgttgtagattctggatattagccctttgtcagatgagtagattgcaaaaattttctcccattctgtaggttgcctgttcactctgatggtagtttcttttgctgtgcagaagctcttcagtttaattagatcccatttgtcaattttgccttttgttgccattgcttttggtgttttagacatgaagtccttgcccatgcctgtgtcctgaatggtaatgcctaggttttcttctagggtttttatggttttaggtctaacatttaagtctttaatccatctcaaattaatttttgtataaggtgtaaggaagggatccagtttcagctttctacatatggctagccagttttcccaggaccatttattaaatagggaatcctttccccatttcttgtttttgtcaggtttgtcaaagagcagatggttgtagatgtgtggtattgtttctgagggctccattctgttccatttgtctatatttctgttttggtaccagtaccatgctgttttggttactgtagccttgtagtataatttgaagtcagtagtgtgatgcctccagctttgttcttttggcttaggattgacttggcaatgcaggctcttttttggttccatatgaactttaaagtagttttttccaattctgtgaagaaagtcattggtagcttgatggggatggcactgaatctataaattaccttgggcagtatggccattttcacattattgattcttcctatccatgagcatggaatttcttccatttgtttgtatcctcttttattttgttgagcagtggtttgtagttctccttgaagaggtccttcacgtcccttgtaagttggattcctaggtattttattctctttgaagccactgtgaatgggagttcactcatgatttggctctctgtttgtctgttattggtgtataagaatgcttgtgatttttgcacattgattttgtatcctgagactttgctgaagttgcttatcagcttaaagagattttgggctgagacgatggggttttctagatatacaatcatgtcatctgcaaacagggacaatttgacttcctcttttcctaattgaataccctttatttctttctcctgcctgattgccctggccagaacttccaacactatgttgaataggagtggtgagagagggcgtccctgtcttgtgccagttttcaaagggaatacttccaggttttgcccattcagtatgatattggctgtgggtttttcataaatagctcttattattttgagatacgtcccatcaatgcctaatttattgagagtttttagcatgaagggctgttgaattttgttaaaggcctttcctgcatctattgagataatcgtgtggtttttgtctttggttctgtttacatgctggattacgtttattgatttttgtatgttgaaccagctttgcatcccagggatgaaacccacttgatcatggtggataagctttttgatgtgctgctggattcagtttgccagtattttattgaggatttttgcatcgatgttcatcagggatattggtctaaaattctctttttttgttgtgtctttgccaggctttggtatcaggatgatgctggtcccataaaatgagttagggaggaatctctccttttctattgattggaatagtttcagaaggaatggtaccagctcctccttgtacctctggtagaattcggctgtgaatccgtctggtcctggactttttttggttggtaggctattaattattgcctcaatttcagagcctgttattggtctattcagagattcaacttcttcctggtttagtcttgggagggtgtatgtgtcaaggaatttattcatgtcttttagattttctagtttatttgcatagaggtgtttatagtattctctgatggtagtttgtatttctgtgggatcgctggtgatatcccctttatcattttttattgcatctatttgattcttctctcttttctttattagtcttgctagtggtctaccaattttgttgatcttttcaaaaaaccagctcctggattcattgattttttgaagggttttttgtgtctctgtctccttcagttctgttctgatcttagtaatttcttgccttctgctagcttttgaatgcgtttgctcttgcttctctagttcttttaattgtgatgttagggtgtcaattttagatctttcctgctttctcctgtgggcattaagtgctataaatttccctctacacactgctttgaatgtgtcccagagattctggtatgttgtgtctttgttctcgttggtttcaaagaacatctttatttctgacttcattttgttatgtacccagcagtcgttcaggagcaggttgttcagtttccatgtagttgagcggttttgagtgagtttcttaatcctgagttctagtttgattgcactgtggtctgagagacagtttgttataatttttggtgttttacatttgctgaggagtgctttacttccaactatgtggtcaattttggaataagtgtgatgtggtgctgagaagaaggtatattctgttgatttggggtggagagttctgtagatgtctattaggtccacttggtgcagagctgagttcaattcctggatatccttgttaattttctgtctcattgatctgtctaatgttgacagtggggtgttaaagtctcccattattattgtgtgggagtctaagtctctttgtaggtctctaaggacttgctttatgaatctgggtgctcctgtattggatgcatatatatttaggatagttagctcttcttgttgaattgatccctttaccattatgtaatggccttctttgtctcctttgatctttgttggtttaaagtccattttaccagagactaggattgcaacccctgcctttttttgttttccatttgcttggtagatcttcctccatccctttattttgagcctatgtgtgtctctgcatgtgagatgggtttctgaatacagcacactgatgggtcttgactctttatccaatttgccagtctgagtcttttaattggaggatttagcccatttacatttaaggttaatattgttatgtgtgaatttgatcctgtcgttatgatgttagctggttattttgctcgttagttgatgcagtttcttcctagcctcgatggtctttacaatttgggcatgtttttgccatggctggtactggttattcctttccatgtttagtgcttccttcaggagctcttttagggcaggccaggtggtgacaaaatctctcagcagttgcttgtctgtaaagtattttacttctccttcacttatgaagcttagtttggctggatatgaaattctgggttgaaaattcttttctttaagaatgttgaatattggcccccactctcttctggcttgtagagtttctgccgagagatcagctgttagtgtgatgggcttccctttgtgggtaacctgacctttctctctggctgcccttaacattttttccttcatttcaactttggtgaatctgacaattatgtgtcttggagttgctcttctcaaggagtatctttgtggcgttccctgtatttcctgaatttaaatgttggcctgccttgttaggttggggaagttctcctggatgatatcctgcagagtgttttccaacttggttccattctccccgtcactttcaggtacaccaatcagacgtagatttggtcttttcacatagtcccatatttcttggaggcttcgttcgtttcttttcattcttttttctctaaacttctcttctcacttcatttcattcatttgatcttccatcactgataccctttcttccagttgattgaattggctactgaagcttgtgcatttgtcacgtagttctcatgccatagttttcagctccatcaggtcctttaaggacttctctgcattggttattctagttagcgatttgtctaatcttttttcaaggtttttaacttctttgccatgggttcaaacttcctccttagctgggagaagtttgatcatctgaagccttcttctctcagctcatcaaagtcatgcaaaacaaaacaccagctttgttccgttgctggtgaggagctgcattcctttggaggaggagaggcgctctgatttttagaattttcagcttttctgctctgttttttccccatctttgcggttttatctacctttggtctttgatgatggtgacgtacagatggggttttggtgtggatgtcctttctgtttgttagttttccttctaacagtcaggaccctcagctgcaggtctgttggagtttgctggaagtccactccacaccctgtttgcatgggtatcagcagcggaggctgcagaacagcgaatattgctgaacagcaaatgttgctgcctgatcgttcctctggaagtttcgtctcagaggggtacccggccgtgtgaggtgtcagtctgcccctactggggggtgcctcccagttaggctactcgggggtcagggacccacttgaggaggcagtctgtccgttctcagatctcaaactccgtgctgggagaaccactactctcttcaaagctgtcagacagggacatttaagtctgcagaggtttctgctgccttttgtttggctatgccctgcccccagaggagtctacagaggcaggcaggcttccttgagctgcggtgggctccacccagtttgagcttcctggctgctttgtttacctactcaagcctcagcaatggtgggtgcccctaccccagcctcactgctgccttgcagttcgatctcagactgctgtgctagcagtgagcagggctccgtgggcttaggaccctccgagccaggcacgggctataatctcctggtgtgccgtttgctaagaccattggaaaagcacagtattatggtgcgagtgacccaattttccaggtgccatctgtcacagctttgcttggctaggaaagggaattccctgaccccttgcacttcccacgtgaggcgatgcctcaccctgcttctgctcacgctcggtgcgctgcacccgctgtcctgcacccactgtccgacactctcctgtgagatgaacccagtacctcagttggaaatgcagaaatcacccatcttctgcgtcgctcgtgatgggagctgtagactggagctgttcctattcagccatcttggaaccgcctatcactgttgttgttacaacgattgttctagaagctatagcagaggaagagccaagattcacagaatgatacaatcatggccaccattactaagtaccctttgagttctaagtactgtgggctgagtacttcgttttttcagcaaaataaaagctctctcttttcctgtcctgatttttttgatgcatgttaattataaggcaaaagatctgtaaaatactagataaaacagggaagtatgggtggctagcagtgtctctgatacacagtgagaacttaataagtattaaccaaagaatggcaagttgagcaaatgattaaataaaggtctatataccataccccacccagagcaactactcttgacattttagtgtgtacatttccagatgttttcctatatatatggttatacacttttttattcttttacaaaagcaaggtcatattgtacataattatttgtaaatcactttttattcccactcacctatttattgtggtcatcttttcatttattgcagtcatcttttcttggtagcaactatggtagaaagactatactgtgattttgaattctccagtgttgactatatcagagtagacccaaggaaaagagatgtttttaattcacagagttattaactgtctagttaaaaatgagactataaaatttaagttttaaaaacctcaaagaagcatatatcagtgattatttggtggtacttgaattaagatacagataacacacacacacacacacacacacacacacacacacacaatgggtattaacatctttgaatatctgcatgctgtttgaataaatggatgtgctgtattatactgaattcctgcttgatggatacttaggttatttcaaaagtgtgaccaatttgattgacaagcctcaagtcattgaggtaaaaccagaaaaatgtattcttttccaatagctgctgttaactctgccctttcaaatttttcctatcctgttacctagcaggcttcctcaaggaaatcactagtgtggttcagacagatacatcctagtattaaaagtctctgtttgagcttggttctgaagattcagtcttgatcattggacaatgtcaatttcacacgctatttagagtgccctttcccctcatccatcttccattccacttgcaaagctgggacttgaaagaaagtggtccttgtctcctatcagccttgtggtcagtctgcaccattattgtgtcccaatgccttcttaattagctcaggaagcactaaactggtcagcaagcagagagagagagtctggcagccccttcttataaatgcctcccaacttagtgagctatttgctttgtgcatccctcattttgcaacgaggagtagaacctctggggaagtaagcggaagtagggagaatctctctgcaccaacgctgcgcctctccaaaggataacttcactctccctccctgacttatatgtgctgtggagcatgcattgcaaggaatcagcattgcttcagcagaagtggctcctctatcccatcgtatgctgaaggtgctcatattggctcgtgagggccaattgttagtatctcttcaaaactctgcattcagcaagcacgcattggaagcgcagaatcagccctggtgggagtatttacaccatggaaatttgtatcatctgacaaccccccatctccacctccactccatagctgtttgttaaacatttaccagcacaccactacctgaaacctaaactttcagggagaaagctggccaaatattggtggttactatacttaaaatgtggaatgtttatgaccttttgttctcagcctttagaggccaattatgggaaagatcacaccatcataacaagagttgcatcttcatgatgctttgatgagcaactttttacacttaatctgccccatttgagtgattattttctttggctaaattcctagaagcagaaatgctgaatccaaaggtatgtctagtttaaagtttcagatactatggttcaaatatccttcagaaaatatgaaccgatctacactcctatcacaaacgtacctggtatactgtacccttactgcaagcaaatattattattttaaattctatttttttctcttttatgcaaagaatatgatttgttttcgtctgcatttctttgactatcaatatgttagcatagttttctggaacattaatgaacagcatttcctaaatatgctttttttttttttttttttttttttttatacagagtctgtatctgtcgcccaggctggagtgcaatggtgtgatcttggctcactgcaacctccacctcccaggttcaagcagttctcctgcctcagcctcctgagtagctgggattacaggcacccgccaccacactcagttaatttttgtatttttagtagagacgaggtttcaccatgttggccaggctggtcttgaactcctgacctcaagtgatccacccccctcgacctcccaaagtgctaggattacaggcatgagccatcgtgcatggccgtttttttttttttttaatgaatttataacaaggcaggtgaaaatggcagccacagaggaggacaaggaatgggagggctgcctgttggataatacccagcttgctccccacctgccctgagctctgtctgagcagaacagtgaaatctgtgagtcttggagcaaccttcttagaggccacactttaattaaaacttttctcacataatacattatctataaaagcaattcggttagaatattgattttgctctgtggttacagaactcccataggaagtcttattcctttatctgtggctttctggtcgtagtatctgcaaacttctttgtaaggatgtgtactcacccacactcatatgcctggacacacacacacacacaaactcacacactcattcagacacatgcataaacacatgcttagacacacatgcacacagacagccattcagtcttgcacacacttgcatgggaacacatgcacacacagactcacatacatggagacacacacactcgcactatgcttaaaaacacagacacactcagacacacataccacacatgtacatacataccgagacacacatgcacacacttattcagatacacactcataatcacatgcctggaaacacatacagagacacactcatactgagtcacacacacacacatgcatggacacatatgtacacccattcatacagcctttcctcccctttacacacagtgctgctgctgtattcaatatcctccagcttttcaaacgtgccataattgctcttgcctcaagacctctgtgcacactattttttctgcctgggactctttcccctctacctgtcacttaaccgattcttatacatccttcatgtctcggtggaagagtcacttccttcagacaccttccctgcttccctgggccaccttggagcctcttgccattctggcactcactgagttttagaatcattactcaatgacggtggggattgatgtctgctctactccttgctatgtcccagggcggggaacgtacctcacacatggtaggtgtgccaaaaatattcaatgtgagtaaactgtggctctgattgactaaggaggtatagctgattagcaacagaggcaggacgtgttgacgccggtgtccatgttcttcattttttgtttcgttttgttttgttttgaggcacagtcttgctctgtcgcccaggctggagtgcagtggtgcgatctctgctcactgcaacctctgtctcccaggttcaagtgattctttcacttcagcctcccgagtagctgggattgcaggtgcctgccaccgtgcctggttaatttttgtatttttagtagaggcgaggtttcaccatgttggccaggctggtttcgaactcctgacctcagatgatccacccacctcagcctcccaaagtgctgggattataggcatgagccaatgcacccggcccacgttctttattttttatacatggactctgttcctcactggcacttcatttttcaagtaattcttttgtctctttataaatacctgtgtgcacatacatacacacgtgcacacgtttacacacatgaaccacaggaaaggtacttatatgacttttcatttgagaattcatccttcagcccattcgtccacctgtctcatgctcctaagctccatgaagaaagaatctctgtcttagtcactgtggtaataacctctgtgcgtagcacagtgccaggccctcaaaattatttgttaaatgaacagatgaaactgttcaatagacagttgctgaacatccacaaggcaccaggctaggtgctaatgggattgcagagacaaataaaaaacagcccttgaccttgaatatattgccgcctagttggggaaactatcatcaaataaatctttgccctttgggatatgcagacagtctagtccttttctgaccctctttcatgtgtatacacagacaaaccaaaggcacacatacagtcgcatatgtgtggttgaaacgcacacatacccacagataaacacccaaacgccctttgcacacacacctgctcttctaggcccccctgtccaagatggatacaaacaggctgcagcatttttagccccacctggtttgtttcctctgagttcaaaggagtttattaatttcagccccttcatgtggaacttgcaaagcctcctgtaggagatatccatggcaactgtgggaaccatctgaaaaggaagatattaaccttttggagtctgctgtccactttgtatgtctcccttagcctatttaacatatttctcagaatctctgaaacaacgagaagcagctgcactggggagtggtcaagtctaggatgggagatgcctccttcatgcaccaggatctgttccccctgcagactaatgttccaagagctaagggccagctggtgtttgagctggaggtggagagaggggctgggacgatgtaggccttggcttcagctttgcctccaaactgcaggtggaactttctgaaattgtcaaaaggtgtcactggggctgcctccaatacgaccttttcagtaaaagtaaaaaaatgcccagtgcctcctctttggatccagaatggattgtttcttcaagcaggtcagctcatttcctgaccttgggcaatccaccccaattttctgatctctctagttatttatttatgtatttattttttgagacggagtctcgctctctcgtccaggctgaggtgcagtggctcaatctcagctcgctgcaacctccgcctctcgggttcaagcggttctccagcctcaacctactgagtagctggggctacaggcgcttgccaccacatttgactaatttttgtatttttagtagagacagggttttaccatggtggccaggctggtctcgaactcctgacttcaggtgatccacctgcctcggccttccacagtgttgagattacaggtgtgagccaccgcgcctggcctgatctcatccatgggacaaggaatgcatttgataaagcccttggcagatgggagacctctagggtgcagcacaaactggggagaatgtgggttcaaaccctaagcccattcaaatacttgccatgtgtctctaactgagtttcttctaagcctcagttcttcatcagtaaaatgggcacaaaaataaatacttgaccaacccattgagaagattgaaggaaatcatgcctgcaagcagtttaggctttgtctttggtatacagtaggtgctcagaaaataacagtttattttttaatttttttaaattttatttcaatactttttggggaacaggtggttttttgttacatggttatgttctttagtggtgatttctgagattttgatgtacctatcaccctagcagggtacactgtactcaatatgtagtttttgatgcctcatcaccttcacccttctctctgaattccaaaagtccattatattactcgtatgccgcctttgcatcctcatagcttagctcccacttatcagtgagaacatatgatacttggttttccattcctgagttacttcacttagaataatggcttccaagtccatccaagttgctgcaaaggccattatttcattgccttttatggctgagtagtattccatggtgtatgggtaccaaattttctttatccactggttggttgatgggcatctgagttggttccataatttttgcaattgagaattgtgcttctgtagacatgtgtgtgcgtgtgtctttttcatacgacttctttgtctttgggtatatacccagtagtgggattgctagactgaatggtagatctacttttagctctttaaggaatctccatactgttttccatagtagctatgctagtttacattcccaccaacaatgtaaaagagttcccttttcaccacatccatgccaacatctattattttttagttttgattattattattattgttattttttctttgagacaggtggggtcttgctctgttgcccaggctggagtgcggcggtgtgatctcatctcactgcaacctctgcctcctaggttcaagtgattctcctatctcagccccctgagttgctgggacaacaggccaccacgcctggctaatttttgtatttttagtagagacagggtttcaccatgttagccaggctggtcttgaactcctgacttcaagtgatctgcctgcctcggcctcctaaagggctgagattacaagtgtgagccactgcgcccgtcctcttttgattttttaaccacttttttgtttaacctttcctgctctgttcactaccttccactctgtgccaactccagacacagatctgaatgaagctggcccttgtggggctcccagtctagcagaccacacagataagcaaacaaacacttacgaggcaatgaagggagcggtgaattctgcataaggaaggcagggggtcttcccagaagaggtggcatccacccaggatacagtgaccaattagactaggaagggaatccacttcctgtagagcagtattcctcaaggggggcagttttgtctccgtgggacatttggaaatgtctggagacacttttggttgtcacagctgtggacaagtgctactggcatctcattagccagtgatgctgctgacatcctacagtgcatagagcagcttcccgcaacagagaattattcagctcacaatgtgtatagcaccaaggtggagaaaccttgctgtaaaccatcatgatattcttttttttgtgggggagagagtctcagtccgtcacccaggctggagttcagtggtgcaatcttggctcactgcaacctctgcctcccgggttcaagccattctcctgcctcagtcccctgagtagctgggattacaggcacacgccatcatgcctggctaatattttgtatttttagtagagatgggtttttgccaggttggccaagctggtcttgaactcctggcctcaagagattcacctgccactaacacagtgaaaccctgtctctactaaaaatacaaaaaaattagccaggtgtggtggcgggcacctgtagtcccagctactctggaggctgaggcaggagaatggtgtgaacccaggaggcagagcttgcagtgagccgaggttgtgccacggccctccaacctgggcgacaaagtaagactctgtctcaaaaaaaaaaaaaaaaaaaaagagagatccacccgccacctgcctcaggctcccaaagtgctgcgattacaggtgtgagccaccatgctgggccaggatcatgatattcttcatcataaaaatgataattactacagataattgagcacttaccgtgtgtcaagcatcacactgggctttctgcatgcgttaccacatttagttcttacaaccagtctgtgggagaattttcactgactctattttaaagctaaggaaactgaggctcacagaaattaaggaacttgcccaacacttcccagaatcagcagccaagtttggaatttaggtcccttagactccaaatccaatttccttttttaaacctcaccatgctgtctcagatgtctccactggagacgtatctggggcttgctttgaccatccaccgcacatgtggcatggagggtgagtcaaaccagcttaaagattcgcggacgaggggctactgctgcctttgaaggtgccctcttgggtctttcttccggcagggaaggttcatgtggttcagcccagtaacatgggcacttccatgagtggagtgtagtataaacagaagaggagcagctagtcctttccttcacctccctcacgtcatgatgcaagttctgctagtgttgctgctgcttctgttactatgattattactacatacatattaattaatgaacacgccctcagctatgccttttattcacttgatattatttaaatctcttagcaacctagtgaggtagtgatgatcgcttctatttcacatatacaaaacaaaactgaggcccagagaagggccaaacacaagaggcagggctagtaattgaatctatattattcttagtggttccaagctggggagcaaacttctcccccaagggtgggatatgatttggacatccaaatatctggagacatgaccaggcacggtgactcatgtctgtaatctgagtactttgggaggcctaggcaaagataacttgaggtcaggagattgagactagtcaggccaacgtggtgaaacattttctctactgaaaaatacaaaaattagccaggcgtagtggtgtgtgcctgtaatcccagccacttgggaggctaaggcaggagaattgcttgaacccagaaggtggaggctgtagggagctgaaatcgcaccactgtactccagcctgggtgacagagcaagactccatctcgaacaaacaaagagacaaacaaatattatctggagactattttagttgtcacacaggggatggagcgtgtcatgtgcactactagcattcagtggatagaggccggggatgctgctaagcaccctggaacgcacaggacaggcctcccactgagtttcctagccccaaaagtcagttgtgctgatattgagaatctggctctacctcaaaaaccccagccttctcagcatgcaatgggactgatggtttctggattgtgttgagtaaatgtttatataaagtttcctaaggacagaaaactctttgcatcatgccaagatgcacagaagagcagcatgaaagttaaaaatttgtttctgattcattttcgacaccgggatgacttttgtggcaaaactataagaaaaggcgggaacaagaacattgtgaattcatccgtttacgctacgtgacagtatttttttttaagatggaaattgggaaggctggcagtgaatcctagtgaaatattcatgacccccatctaatttctaattcaattaaaaggtgctaatgtagttaactgtgacaacaatgatttttgttaatgaatatatttaaatgcttatcagccaaggtgataaggagtgcccaaaagacccagccacaaacttgaatttcaaattggtttcgaagtttacaggttgttttcacaaggttgggaaccaaattccaaatttgcaaaatggataattttaggaatagctattcagtttcaacggcagtcttccattttcttgaggattcaagacaggattcttttaaagtgcaagttcttcaattgcatttgaaataggatttgatttataaaaattcaaattatggtgactttgcaagaacccaaggacaagaaactgggcaaatcccaaggtttgttgctgagcagaggacagagtttctctgcccgggatgttacaacattgttccaggaatggcaggttatgttctggaagcccctttacagagggactgaatagcatctcttcctaaaaattcatttcggcctgtggggtggatgggtgaacacagacgatgtgttggagctggtataccagctgtctagacatagtctctcatccttacactggcatttaagccctgtacttgatattgcctagtttctaacacagccatcaaaatgtgaaattacctattttaaattttacagtgtttgcctgacttttaaaagatggatttctagcttttgaaagaaaaatgtctctttcatgttctggattcctccttgcactgttccagtagtaattaattatgacaataatgggtgtgatgtcatctttgtgaccaacaagtctggttttaatacttagttccgacactcaccagctgtatggtttgtggcaagttatttcacttatctgagccagttttttacatctgtgaagggaggattatatcttgtatgcttttccaagttgttggatgggttagagagataatacatattaagtgacttataacttcttgacaaataaatgctcacttaaatggtggtggtagtggtggtagtagtagtagaaataataattgttgtggtgcttgtcaatcccacatattttaatcttgaaacaccatatagaataggtgactgatatggttgggctctgtgtccctacccaaatctcaccttgaattgtaataatccccacatgtcaagggcagggccaggtggagataaatgaattatgggtgcagtttccccatacctttctcctgatagtgagtgagttatcatgagatctgatgattttataagcgtctggcatttcccctgctagtacattctctctttgcctgccaccatccacgtaagatacggcttgctcctcgttgccttccgccatgattgtgaggtctccccagccatgtggaactgtaagtccattaaaacctctttttcttcccagtctctggtatgtgtttatcagcagcatgaaaatggactaatacagtgacattatttctattttattggtaaggggactgagactcagagaagcttagctaacttgcccaatgttgtgcagttggtaagtagtgggattaggatttgaacccaattagtttgattcttaagaaaatgctctgttcccatgtcatgttccttccagttacaattcatattctatcttccccaaaatagtttaaaatctctttgcacaactcgcaatgcctagcaccttcaattcacttgtaggtcgttaatagacatcatttaagaatgaccacttcccatcattgctttgaacaaaaatcacttatttcctacattttcacaatgatgtagcctcttcaagataatgcagaaaatagaacaaaaggttgtgaagatgcattcagaagtactgcctttgacggtgcttggagaaaggtctgggtactagtttctgcatttagacccactctaaacatagagacctcttgaacaatgcctgggataattgtttataaatccaacccttctcctaagtcaggactgggaatgctaagttatcagaaaggtaggggtaagaaaagaaaaagagggcaaggacatcagtgtttgattggtgatgtttaaactgaaaaacgaactggcagaggacttctggcttatactcctggaaatcccaggagtagccaactctagagctttttctggagatttcagggaagggatggggaacagggagatgaaggctagagggcacagggcttcttacaggtggtaaaaatgttctaaaattgactgtggggatggttgcacatgtctgcaaaaatactgaaaatattgaattgtatactttaaatgtgcaatttgtgtggtatgtgaagtatatctcaataaagttgtttttaaacatctcaacaggccaggtgtggtggctcacgcctgtaatcccagcagtttgggaggccgaggcaggtggatcacttgaggtcaggagttcaagatcagcctggccaacgtggtgaaactccatctctaccaaaaatacaaaaaattagctgggattgtgggatgtgcctgtaattccagctactcaggaggctgagacaggagaatcggttgaacccaggaggcagaggttgcagtgagccaaaatctcaccactgcactccagcctgggtgacagaacgacactcaaaaaaataaatataaaataaataaacatctcaacaacccacatgagcaattcactgtccaggtcatgctctccctctcagtgtctaccccttgctttctcaaagccttttgtggtctcccttccttatccttccaatcttaggccaattgatattatccatatggtcccagagtacacaaaatgataaatatcttgaaagctacagtcttttcatttttagaacatgcgatttttctgctcaccctagtttgtttttgtatattccagatatacatttggaggaaattgatataccaccgccaccacccaaccaccatctgttctcttacttttaagcccactctgggaatctttggaagttgggaggggaaaaccacttcaacattatgttgaacttcctactctgtgtcctcaagggagacaaagaataacacatagattgagggagctcattttctaacaaaattcaggtgttatcacctgtgatctgcaggaaaacgaattcccctccctgagtgtgttttcccatctatacaaaagggttaattatggccaggcatggtggctcacacccgtaatcccagcactttgggaggccaaggcaggtggatcacaaggtcaggagatcgagaccatcctggctaacacagtgaaaccccgtctctactaaaaatacaaaaattagccaggtgtggtggcgggtgcctgtagtcccagctactcgggagactgaggcaagagaatgttgtgaacccgggaggcggagcttgcagtgagccgagatggcgccactgcactccagcctgggcgacagagtgagactccgtctcaaaaaaataaataaaataaaataaaaaataaataaaaaggaaaagggataattatagtacatattaggtttgttgtgcaaacgaaacaagacgacttctataagtcacttaccctgacattagtacataggcacttggtgaactgaagtgatttattataattgctatggttacatttcaattgatttgtatgcgtataccttggaaattcaatctttttgaatatcttagggtgtctatccttgagaatatcctaggaatacccaccttcctgaaggctccccctttattgaggcgactgccactttagcctggcccagaattcaaataaacaaagagtttgcatgttacaaagaccactattggtggccaggaggggagtgttctggaggctggaacttcaccaggtcaaccacatctgtttagaatttgcataggcactgactatttggtatctaaaagttgcttctgtaatcctttcatcgttgcatttcttttccagtcctgctccttctgtaatttttttttctacctttgcattttgatagttatttctgggagaaccaaaccagagatctcaaaccaggggttgggatgggggaaatcacagatgtgtgttgtttgtagctggaagtgtctcgattttttaattagtcaccagcaccaaataagcgtcagacttcacttgttatctggatttgtgactcctctggaaacataaggcacacatttctgcatgccagcaaccagctagaactgaaaagcagtgacctccctttgaaggggatgtgcctgttccggttccccagtctccatccttcttcctgacttatttatgctatctgtctggtgtctggatgcatgtgagttcataatccccaaagtaagtctttgtgatacccgggaatgaagttatggggttgctcatgttagaagagatattgagagcccttactggtatccctaaaaagatcacagtctatgaggccaagtacaggaatgaaggtgttttatcgaggaatacatagtaacaggagctctgccaggactggaaagcctggttccagtccccattgtagagtggctgagggtcgatgatgaaacttctaggaccgggaaagtgtacgccttctctccaagtttaatatgtcatcgttacatcaaaccctctgagagatgatgtcagagaatttgcgttgctccccctctcttcctttaagatgtcaaaaaaaaaaaaaaaaaaaagggataactccttggctgcagccactgctacaggtttcacagcaggtctatgagggcctctcttcctctccagtccagaagcacatcagctcacattttaaaatctctaatagaagcataaatgaggtttatgaaccattaaccctaggtcagttttccaaagtctaaaaaagcattttgaaacaattaattactttgcttcactggaaacagattgtagatgagtgcaactaggcagatgctcgagatgaaagatttcactaagatggacaataagctcccaccccagaacctgctggggaagggggaagcctatttctcatatccactgctctcccacccattctgcaatatcatggtcattcctaagcgggaactgtttgcattttccaagcccctttcttcttatacctttgaagtataaccttgattttttttttaactgttcttgggaaaaggaccttttggagtaaatgaatttgtaggttaagaggaagattctttttcttttattattttactttaagttctgggatagatgtgcaaaatgtgaaggtttgtttcataggtatacatgtgccgtggtggtttgctgcacctatcaatccatcatctaggttttaagccctgcaagcattaggtatttgtcctaatgctctccctccccttgctcatcacccccgccaacaggccctggtgtgtgatgttcccctccctgtgtccgtgtgttctcactattcacctcccacttatgagtgagaacatccgatgttgggttttctgttcctgtgttagtttgttgagaacgatggtttccagcttcatccatgtccatgcaaaggacatgaactcattcttttttacggctgcatagtattccgtggtgtatatgtgccacattttctttattcagtctaccattgatgggcatttgggtgttggttcaaagtctttgctactgtgaatagtgctgcagtaaacatacatgtgcatgtatctttatagtagaatgatttataatcctttgggtatataccccagtaattgaattgctaggtcaaatggtatttctggttctagatccttgaggaatcgccacactgtcttccacaatggttgaactaatttacactcccaccaacagtggaagattcttttaatttcattcagttcagttgaaaatgccttttaaaaaataggagtcccccattcttttgtattaggaggagcttagaaaagatctgcataaaaaaacaactactgtgctgaacctaggttatgcctgggctgagacattgactttttttttttttttttgagacagagtcttgctctgttgcccaggctgaagtacagtgatacactctcggctcagtacaacctccacctcccaggttcaagcgattctcctgcctcagcctcctgagtagctgggattacaggcgcatgccaccacacctggctaatttttgtatttttagtagagacggggttttaccatgttgatcaggctggtcttgaactccggacttcgtaatttacccgcctcagcctcccaaagtgccgggcttacaggcgtgagccactgtgcccggacaacattgacctcttataatgactcagggttcttggagcaggggacaatggtcagaggccagtgtaggagacaagtgactgccctctttgtccaagctttgccgttaccatgctgtaaaggtctgtgtgagtcacttttctcatatgagtctcactttgtacatctataaaacgaatggattggactggatctcagattttctttctcccctgacattctatgattatttataaaactaattctgtagacacaaaagcttaagaaatagggctactcctttcagttcaagatggctgactgagcacatcttgacagaggaaatataagagcaagaataaatcaatggcaatgctggaaaatggaaaatgtcaccatcagcaagccagaagttttgagaaatgtgtgaaacagacaaaatatatggcatcagatgaatggtgattccttaacagccttcaggagaccataaccccagacagatgaaagaggagacagttgtaaaactgagttcttccaacagagctctggagaaaaatcaagattggagacagcaggctgggagaagcaatggtctgtgggatggtctaagggttataaattagagaacaacagaacaattacacgaattccccatttgaaagagaggctggctacagcaccttgctcctaggttttctgtgaagtcagttttctgcataaagttaggactgaagtttaggtagctggagaggacatgggtccctgccccaagtaacttgtgctgaacccaactaagacagagcattcacaatgagaagtcaagtttccctcccatcatgcagggaagcccacatggatgtagctcttctccactcaaggcagctctaagagtgaaagaggaaagaaacatgaaaagtggcttaacagttaaagacagatttattttggagaataaacctgagaggggcttttggccgattttggttaggagcgtggggaacgtaaaatggtggtgtttgtccaagatggcgatgctcctgctctgtcagcagccattttcactacctgggggacagtgactgccttgcgttggaaggaaaaccattttagcagctaatactaatcagtctagaccagcactatacaacaggtcagtctgtgatgatgaaaatgctgtacaactctgaactgcccaacactgcagtctccacccacatgtggctattgagcatttgaaatgtggccagggcagtgaaggaactgaatttcaatttcatttaactttaactaatttaaactgaaattgaaatagccacacatggctagtgactaccacatgtagctaattaaatagctgccatactggacagaaaaacctggagtaattcataagaataacttcataacccaaaaaagaaaaccttggaaattagaatataattgataacattaaaaattaaaatggggccgggcgcggtggctcacgcctgtaatcccagcactttgggaggccgaggcgggcggatcacgaggtcaggagatcgagaccatcccggctaaaacggtgaaaccccgtctctactaaaaatacaaaaaattagccgggcgtagtggcgggcgcctgtagtcccagctacttgggaggctgaggcgggagaatggcgtgaacccgggaggcggagcttgcagtgagccgagatcccgccactgcactccagcctgggcgacagagcgagactccgtctcaaaaaaaaaaaaaattaaaatggaaaggctgacggcagaagtaaaaattaagtaaaagcactgaggttgggcacagtggtgcctgcctataatcccagccctctgggaggctgaggcaggggaatcacttgagcccaggagttcaacaccagcctgagcaacagagtgagacccccatttctacaaaaaatttttaaaaaactagctgggtgtggtggcatgcatcagtagtccaagctatgcaagaggctgaggagggaggactgcttaagcccaggaggtaaagcaagacctgtgtcaaaaaaaaaagaaaaaaaatgaattgacttagtgactttgtgatatggaatatctagctaaagcattctctccaataacataaaaattacattggaaaagttgagagatgagagataggtccaggaaacccaaggttcattagaatgcttctagacagacataatggaactaagaaaagccaaagaaataatagggggagcgtacaaatagttgctcacaatgcaggtgtaaaatcccaatgcagttactaaataagttaataaaatagaaaggggatgacataaaatcaaatagataaagtccatgcatacctacaacaaaatattaatcatacaccaaaattctgcaagatgaaacctgggagatgaatctccgaggagggaagaaatgaaagactgcctttttagtacgtgggtgagagtaggcttcagaatattgatttatttttgaaattgctaagaaaacaggattggaaacataattatgcttgtaaaaatatacatataagttaaaatacaaaaaagaggaaacatttctatttcaccaaagaaatgaaaggaagaaagaacatttgaccaattagctagaatctagaaaggggaaccctcaagagatgtagaagagcagacaccataaattaagatgacagaaagaaaactaacacacagtgattacagtaaatataaataacttaatttcttctattaaaagacaaacactattaggatttttaacagggaaatttaactatatgttgcttaggagaccatagggaaaagtcagaaagaaagcttgaaagaaagatataaatgttgaattagattggcaactatcttttctaaggaagaattttctttgcttaaagataaaatgtcccactattttttattcttgctctattaaaatactcttgttttatgaaatgttagccttaggtcacttgctaaactattttgaaattttcactcttgtaaaaaattctcaaagtctagcctcagggacattagggctagaataatacatcaagctcatgtcaggaattccaaaaataataaagcctagtagtccagggtcataattacatttagccatttttttcatattattctatatctttttaatattacaaaatcaaacttagcagttggaagaaattcaaaggattgaatgttataaagaacacataactcctctctctgtctcacacacacacagacacacacacacactgctaccaattaactcttcaaatattgaagtgtgtggagaatcaactcttcctaccaaacacttcaaatatccttttccctttctgcaaagacttcttgatacatttgctccaatccatctgtttttcctgagggcctagattcgggttgttctgcctgtctcctctgacaaaaatccatatttgaaacaataattcagtgcaataccctagaatgccaaagctcaaatatctgcctcatctaatgacttcatttcatagatgagaaaacctaaatttagaggaataaagaggcttgctccacgtcacactgttagtttgtggcagggcttggacttgaacctaagtgtagagctctttattttgtttgtttcagttgatagagaaccaaccctgaatgggtcttaattcctataaatgaaagtttgaggaccagaactaggttcaggtgaggcctgaccaaggtgttcaaactatgtaatcagaatgatgtttctcttcatctgccagaatactttcctctgtgttggcttcattctcagactccgtgggatggcaagtttaattctagattcaatacagctgtggagaacctgtacctccgatcctttaaccatgacgtgtatttatatctcattggttcaacttgaatcatgtgaccatccctgaaccaatcactataaccacagtagtgcatgctaggatgggtctggttggagccacatgcccatccctagaatgggaaatgaattcaactccacccaaaggatatgaacgaagagtcagagagaagtgattacatgaaggaaaacatggacaccctaaacaggaaaaggatgaatgtcagctaagtggcccagtcaactctccttcctcctggtctggtaagttaacaatgcacaatcattaacatgtgttaattcatcctttattaaagaaaacaactgttactgaatctagtcaccctatttcaggggcaggaacagccaggcaagagaactcggagtttgttgttgttgttgtttttgagcgctgcctgaagggcagtagtgaaggatcacaacacttaagctatcgttcattattctgtcatcctctaaatcatccagatcaggaaaggcagcagctgtctggaatgacaatcctttgataaattgaagcctcccaggttgccgagcactcaccttgtttcaatcattgattgtgtaaaatcaatggagaatatggaacctgagatagtaatattctcaattctatgcacattcaaaactggctaccagagtattaaattcaggcagctgccgatgcctctagctgctgctgattacaagatagtctttaacttgtgctggtccattagagggcaataaatcagaagggtagagagaggtaacccaaactctcttgaactttggaatgtagtgggaaataccatcaagataatattctcagctctatatgctttcaaaattgacttgccagagtatcaatcaaattcagacagctgccagtcctgcagatgttgcttatggaatcatgtttaagtcttgatggtagactttaggaagatatgtaagaatggtgatgcaagatatcccggcgtctcttggacctgggattgtagtggaagacctctatagtttgtgacttcttaacagtgatgagctggttcttctggggaaaggaaataccctccctttcaaattccttattttttttttcctaattacagtcatgtgtctttctttcgattttgtagcttgcattttctaaagttttatgttaattgataaatatataatggggtacaatgtgatgtgtcaatacatgtatgcattgtggaatgatcaaaaaatacaatcatgtactttgaatgaacttgaaaattatagcatcttgcctacagaacatacagcccaggactggacaatcttaaatttctgttcctccctctcacagtgattggacccaagctaggccaatcagaaacttatcctggaatttttatatggagagctgatagaaaaaaaaactcttttcttctttctttttttttttctttttttgagactgagcctcactctattgcccaggctggagtgcagtggcacaatctaggctcactgcaatctccacctcctgggttcaagcgattctcctgccttagcctcctgagtagctggaattacaggcacctgccaccatgcccagctagtttttgtatttttagtagagacggggtttcaccatgttggccaggctggtgtcaaactcctgacctcagatgatctgtccgcctcggtctcccgaagtgctgggattagagatgtgagccactgtgcccggcctatcttttttctttaaatgtgaggttgtaaatattggatcccatggataattatttgttggtgattgtggggtggggaaggaatggaagaataagaccaagagagaaagaaaaagcacagtgccaagcacatagttgatactcagtacttttgccatggatattttgtaaatgaataacacattctcattacaggaaataatctggaaattacaggtggaaaaatgtcatccatagtcccatcatccaggcagctgctctatggcaatcaaatcttctcccattattaattgaacttcaacatcaggcaataaatcctgatcaagaaaagggtttttaaggccaaattcttgtacctaaataacagggctcttctgacaaagggaacaagtcatagtgaagtaaattgccaatgtgaattgcctgaatggtattttacgtagagtccccaactatctccaagttaatcaggcttagttttctgaagtgacaacccctctaatcccaaccccagctcccacccctactcttacttctgccacccaggtgaaaatttgagtgttctcattgttaatgattgttgcctgaaacatgttgagactttggaatctgtgaattcaaggctttagtcagttaaggaaagtcatcttctgttgtatctctgattactgtttctgtagcatttctggctctctgacatgttaacatataggcatataaaaaacaaactctctgcatgcactgctacaatggctaataatcattgaaatatgtttctcaggaatagttcacattataagattttctgttcaccatctactctcatccttgtcatcttttttgtctttttcttttcttttttttttttttttttttgatacacggtctcattctcgtcgcacagcctagggtgcaatggcttgatcacacctcactgcagcctcgacttcccaggctcaggtgattctcccacctcagcctccctaggagctgagactacaggccatgcatcaccacgcctggctaattttttgtatttttagtagagacatgacttctccatgttgcccaggctggtcttgaacttctgggcctaagcgatctgtgcacctcagcccctcaaagtgctggattataggcatgagccactgtttgggccttttatgtcattttgtcagtttcttacagtttgtctccaacatttgtgatctcatttttccacattgtcaatcctggttgttgcaacattaaatgtgttttttaattttattattgcacatttaaatttccctattttctaactacactccatttttatcacattctgtgtttcagcttaacctagtctctctcttgatgttttgctcctgtttcataatgactgtttgtcaaatagttttatatatttgcttttctttctataataaaccacattgagaaaactccactattttcttccaagtgttcatggtggcattttcttttctgtgtcctgcagcagttctttatgggctcattgtgaatggcttttcttttcttgcactcgaacatggaggcagtgatccaaatttagtggtcgcaaacagaaagaatgtgtggattttttatagattatttctctctacttgggtgctgttgaatcaattttccagaaaaatgttttttatctagcttggctatactgaaggttctagcatcatttactccactagttcttaaacattactgttactagaatagaatcacctgatatgggagattggccagagtggtaggaaaaactatagggaaaggatgcaaaccttctgaaaggtcagaagattctgcaaatccccgggggaagaatagctaaaggcagctgttctataatcctgagacagagggcaagaagtaggtacaacggagtgtgggggaatttatcttaaacaagcttgtttacttatgttgaccaggaactgacttttgattatttgtgtgatgttccctgaaaggggaacaataaatattaattacctacaggttttgtgggctccaggttttcggcattgtgcctgcactgaaagcaagtagctccagcttctcagggctgctctctggccactagagccaggcagtcacctagctgctcttacactgcatacctgtgtctgagtactcatttcatccatgggctgggttatgcaggacagacttggcaacctgggaggtgttttaaactagaatgctagtctttatccccagagtttctgattgaccaggtctggggtgaggcctgaggatttacattgctaacaagttcccaggtgatactaatgctgccattgcagggaccatactttgagagccactgttctgtttacatttctgaccttctgaaaagttgaaacaataagcataagaagaaaatagagtttgcggcatgtactgctgcagtgactctatctggctgagagtgtggtgtgtgtgtgtgtgtgtgtgtgtgtgtgtgtgtgtgtgtgtagacacatctcttaggattaagaatgctgctcctcttaccttctggccagtacttttctccaagttagattatttgattggatgtaaaagaatgctattgatgatagcaaagacttggaaccaacccaatgatagactggataaagaaaatgtggcacatatacaccatggaatactatgcagccataaaaaagaatgagttcatgtcctttacaggaacatggatgaagctagaaaccatcattctcagcaaactaacacaggaacacgaaaccaaacaccacatgttctcactcataagtagaagttgaacaataagaacacatggacacaggggaacatcacacaccggggcctgtgggggtgggtgggggggtgggggcgtatagcggagggagagcattaggccaaataactaatgcatgtggggcttaaaaccttgatgacaggttgatgggtgcatcaaaccaccatggcacatgtataccgatgtaacaaacctgcatgttctgcacaagtatgccagaacttaaaacaaaaagaatgctattgatggatgtggcctagacaacactaaaccaagtgtcgattctgaagagtaacagtttctttctgcttggcaagtaccttacatgtctgagacagtggtaaggttgtcgaagagatgtgtgcaggagatacaaggggctgtagggagagtgagtgtcctacagtatgtctagtgagacatttacatgcccattttcagttttatccatcagtcttgttagtggaagcttctccctgattttgacagtaggttcatactgagtccctgtggagtggaatagccaaaccagatttttcccttctttagctaaagaagctgccagctgctcttcattctggtggggaaaagaaggtcaattgagagcagctgtctatgctctttaataagcagatataagctgagcagacctagatttggaaactattataatgaggtcttcgatttgacatagaggccctacctacacacttctctttgtctgcaaaggggagaagggcactttgcatatagaggccaggggttttctaagaagacgctaacattcccacaatacttggtcccgattatttcacttaagacgttctactaagagggctggagggtacctaactaagagtcagtggaagagcagagtaatgggataatcataatgaaagtaattataagcatagagagaaactagaccaatggtctctttttggcactgatccataaaaacatagcaaatggtggttctgggcgtctaagatacatagaccttaggaagacttctcatcttgtatgtcggcagttagcttatggcaggaagcagctgtgtgttagctaagtgctaaggtccaaagcatctaaggtttcaacctatgagaaggcttcaaatagggctatccccccgtggcctgtttttcaccaatgctacagttagtagactctaaactaagccattctgggggtgcccgaggatctctacatttctaatttctcataccagtagaccaagaggtggcccaagtgaaactagtcccaacccaaggaagtttaaacttgcatgaaatgggactgtgcccaatcatgactactccaatctttctcattttctagaatacaagataagggaagttgtatgcgtgtacataagtttgtgtttttcttattacagaatatgccaagtgttcaagttgtagtctattattaaaacttaacagtttttagtaaacttttgtaatctatagggcatgttccataggggttattggctttcgacttgaaaaccaatacagtgtctgcaaacatgtaaacaaacttgcctgtgggataactttttgcactatggttagactatattgggtggtgtgtgtaaatggttaagtgaggaaatcaaaacacttttaacctgaaggactgggcttatttagatttggaatcctcctaatcagcacactgtcaaataattgtttttttctaagaaaagatttttgcctagtacctatgacttctagaggaccaatggcttctcctaagctagtatactttggacatcacctacaagaccagcctctactaagcaactaacttccctcgcaatggtccagacactgaaatcgctctaaattgaacctgggcttcttcataccaagaaggtggtaatcacatttttagatgcatcaagaggaaaggattgggacttttgagagatacagatttgatttttggactggcccactaatagcagcgtgtgagaccttgaaaccagcaacggtgttggaaccatctcctcctaccagattgagggagctgactatgcatataacttcccaaatccaagctcagtgatgtcatggtagtagcttgaaatcaggctttgtatgggtgctttctccatagaaattggcaaatgctacagaatcttggctttttgtttcagagatccatctgttaaaacatttattaggccaccactgccttgaatattgtgatatggggccagacaggaattaaggactctgcacttaaatttatgttttattcctctctcctctccttatctctttttcttccttcctaccttctccctcctttcctcttctttccttcttgtggtaattttaatgagatgcattacaggcctgcagaaattaaattaaaatctgaagtctttccctctttaaagttttcccccttgccatcttcagagactaagccttcagaatgatctttattctattgttactaatgaagtcagctgtagggctaactgtaaatcttttgaaggtaatttttttctgacttcttttatgttcttctctttgtagctagtattctgccatttcagtctgacatgtctagatgaggggtttcattgtttgttttgcttttcttcctgctggatatttattgggctccttgactctgtgtttactctcctgtaatcattctgaaaaattctcataatatcatcataggtttgcttttcttcattctttctgccttcacctgcttgaattctgattataaatacgttagaattccctggtctgtttgggtcgtctctcagctgctgcttcataatttctttcgacttgtcttccagttcccctattcttctacatttgtatctaatctgaagttaaacctgctcattgacttttttaaaccatttatatatgttttatctttagatttttgatttcttgtcatctatttaatagtcttctgtttaatgaaggctgtctgaagcctgtattttatttcattaaacgtcataattatagtcctaaggcaacacacagatacagaaaaacacacaagtcaattgtatggtttaatgaatttttataaagtgaacattacagctgggcacggtggttcttgcctgtaatcccggcactttgcggggccaaggtggatggatcacaaggtcaagagatggaggccatcctggccaacatggtgaaaacccatctctactaaaaatacaaaaattagccgggcatggtggtacacacctgttaacccagctactctggaggctgagagaggagaattgcttgaacccaggaggcagaggttgcagtgagccgagatcacaccactgcactcccgtctgggcagcagagcaagactccatcttaaaaataataacaacaacaaataaataaaaatgtagtttcaaattgtttttttttaatttaaggaatattttcttgaaatagcatttttaggatttcttctgttcccttgctttggttttcatctgcacaaattcctgctatccctgtgttcagcctctgttgcctgttttcagtatttcttaatctctcagccttttttctgtttctttttaatttttacttttaaaattgtaacatatttatttattggtggttgcaaaatgttgattgtcttattttctttcaatggctgtggtaacaaattgccacaaacctagctatttaaaatgacacaaatttattcttagagttctataggcccaaggtcccaagtgggttcattgggctgaaactaaggagttcgctcccttaagagtctccagggaagaatttgttttcttaccttttccagagttgggaattggattccttggctcatagccccttcacccatcttcaaaggcagcaatttagcatcttcagatttctctgtgctttcactactgttttgtctttcgtctctctgattccctcctataaggaaccctgagattacatcttgcccatcaagatcacctccctatctcaggattcttagtcacacctgcaaaaacccttttgctgccatataagatagcattcataggtctagggattaatatttggacaattcagggggctcttattcagcctaacacgataatgttctgatgctatgatttgtgtttcacttatcagtcaagcactttgacagaggccgtttatttcgtttactatgtgattacccagtatgttcacatgaaaaatgcagaatatgtgcttatttttctttatttaccagttttcaatataatgaattggtttcttgtcatccccaaaaggtatcagtttttttgttgttgtttgtttgttctttttacaaattgcattatgaactcataggcttcaacatactggaattttaattcactaccccttattatctttgttgaagttcaacttctcccatctttgccaatgcaagcctgtttgagtttgctactgggccttttctatgtgacccttgtggtctttgacagctgtaatcctatctggaattatactgtattccaggctagtcctgtatatttctgatcccacacttggaatcagctatttctccaagaagccctggtgtcttttagatgaatggtatttcaagaccataacttgggcacttagggatattcattgctgttgagttggttgttgtctctagaagtttttaagaaacaaattataacataatatacaaaatatctcatggattcatattgatatttctaattctaagtcaagatttctgaggttttattttaaacctcatttctattatatcaataagtactcttccattccaagaaacttagttttcaaggacctagaggatgataaaattataattcctcattttatccaattttacgtatataacagtccctgaatagtaataatataataataatcatatcatctccattatgattacttaaaacacttaaaattttttggtgtatgttcttcttatccccttcttttttcaagttcattgagctaaaatttagggtaacagcaaagttatccatttcaggtacacagatctacgaattatgaccaacctatatagtctcactattcttttttttttttttttttttttttttttctgagacggagtctcgctctgtcgcccaggctggagtgcagtggcgcaatctcagctcactgcaagctctgcctcccgggttcacgccattctcctgcctcagcctcctgagtagctgggactacaggcacctgccaccacgcccggctaattctttttttaatttattttttatttttagtagagatggggtttcactgtgctagccaggatggtctcgatctcctgacctcatgatctgcccgcctcagcctcccaaagtgctgggattgcaggcgtgagccaccgtgcccggcctagtctcatcattcttaatagctatactatatacacattgccagagcatatagcctttcataatatttccttcccctctttgttttcattttgtcttaattctatttaccttaattgatttttatttgatgctcattagcaatcattatgttatttacccttaagttattttgattgtctaaaactcattctacagtagattactcaggaaaggcttagaaaaacagtatttcttgagttcttgagctgtgataagtttgtctatggcttttgtacttgaaaatcaatttttgctggatataaaatccttgatgctctcttcctttgagtatcttatatatattactcaattttcttctggcataaagtatggctttcaatgcctgatactcatctaattttctttcccttaaaagttacatgttcttttctgcaagatgctgaaagaatattttaagtcccatattatattaggatatgtctaaatattaattattccaggtcaacattctcatgtttgcattgtgtactttaaaaatgtagcttcaaataatttctttttaattttaggaatgttttcttgaaatatcatttttagggtttcttctgtccctttgctttggttttcatgtacacaaattcctgctatccatctgtttgatctccattgcctattttcaatgcttgttactctcttttttcccctctacatttctttttaaaatttattttatttttaaaaactatgttaaagtatacaaaacataaaatttaccctcaccatttttaagtgtacaattcagtagtattaaatacataatgtgcatccatcaccaggatccatctccaggacttctttgatcttggaaaagtgaaactctgtacccattaagcaatacttcatttcctactcctctcaggccctggcaacctctattctaccttctgcctctctgaatttgactactctaagtacctcacgtgagtcaagtaatacaatatttgttcttttgtgattggcttatttcacttaacatgatgtcctcaagtctcatccatgttgtagcatgtgtcagaatttcattttttttaaggctgaataatacgtcattgcatatatactgtgctttttaaattatttatttattcatttatttatttttgagacagagtttcactcttgccgcccaggccggagtgcaatggcgccatcttggctcactgcagcctctgcctcccaggttcaagcgattgtcctgcctcagcctcccgagtagctgggattacaggcatgcgccaccatgcccggctaattttttgtacttagtagagacagggttttgccatgttggtcaggctggtctcgagcacctggcctcaggtgatccacctgctttggcctcccaaagtgttggaattacaggcgtgacatgatggacatgtgggttgcttctaccttttggctattgcaaatgatgctgctataaacatgggtgtacaaatatctgtgttcttcatttctttttgtcttcttaatatttcctcctctccactctctgtttctttaaggcattgtttctttggttctttctagttggctaccttggggttcacttttttccaagtccatcatattttgcttttataacttccttctttcccatgttctacagatatcaatactgtgtgggtcttgtatctgttagtggtctgtccccaccctcttgtaatttggggttcttggttgtttagatgttggccacgtgtttttagtttttctatataactgctctgctttcgggtaggggttgaaagagattgaaacacgaagttgccattgctcccatcttccaagaatctcccgtggttgtttctctatgtctcttatgctctgctcattgtgccttttgtccttgtgtgcttaaatatttattactatgtgctgcttattttccttggatttttatatgtggtcatcccttgaggattggggggaattcaccttcttctgagagcattttcctttgcctctactggacacctggggcagagtctgcaaatgtgttaaactcgttcacaacttagagtttgttggaccctgtgggtggctcattttgggctgtaacccccgtggttatgtctttttagagaaggtgttttcctccttgctctgcttgttgtgaaacaaaattttcttatagactctggggcttgggacctatgtctggttcatcctcacactgatattataacccttggggtcccatatttggtagaatcttgcatttaacttcccactttgggaaggctttaggcttggtaataagtcacttgttcccccatgaagtctaagctcatcagatttgggaaatactttcaggacgaaagtggatcagcactctgtttatctttctgagttcctgcttttccttagatttaggcctgataatttctaactatcagcacttttagttgttttcagggggatggtaggtcatccatttgattagaaatggaagtccaaatgatcttttaatatgtaggtttttgtagaaatattgtccctctatgcagtcataagaatggctcctctttctttcaattagatatcaggcaccaggctgggtgaggctgggaatctcacccaggttggtgcccagacctagtctgggcatccaagggcatctaagatggctcaaggaagccagatacagtcccggaacccagataagatctacatccatggccagtcatgttggaacagtccttccttacctttctctcacacaatataacctatatcctggctacaggagactcaggctcaatatctgagctgatactaaatgaatttttcttggttgataaatcttggacaggacaagggttctggaaaagactgcctaggtttggatcttggcttccctgcttacagtattatgaccttagccatgtaacttcatctctcaaagtcacttttcctattttcaagggagatctaaaaatagtacatatcttattggaatgtttgaaggattgtctgtgataaagtatttaacacaatgcctggcacatttataatccctcagtaaaaatagctattttaatatgctcaaaatgaaggtgttgtggctttttttttctccaattgctttttcttctgttgagccctacccaatcatccctcataccttcataccatctctttggtttatcacagttactctttgccatagtagaaatttggaatcaaagttttaagcgttgagatgggaaaacaatttggtaccacgaggaaagagaattttctgagtgaatggaggaggaagactgatggagcaatagaagctacagtacagggaccaagttctgttgcatccataaaaatattggcgccaaaaagagagggaaaagataaggctgaaatgaggggtggaggagaaagatggaagtggacaagtccggtgcatttgagagattgagccactggttgactaacgctggagtatttactgtgctattgattgcaagaattctgcagacagtaggattgagtagacttcagggaactgatccctgagtatctgggttttcagagttcgtgaaatttgcttttggctgctgtctcttcttttcactttaccatcaagagacacagagcactttgggtagcgttgctgtgattgtcctgaacaacacaagcttttctgaacttctcccactacatccccaacaaaactcatctctcttgagatccgttcttcctgcattttctctgccttgctaatctgacaaatatatccattctaaaatatggtgagctgatggattcatttcttctccatctaggaaccttctaatgagtttcctggaaagttcctcgttgctttagcacaaggataacatattgattctgtccagtatgccaactccaatctagtgctggtgaaaatgtggagaaactggatcactcatatattgctggtgggattataaaatggcacagccactctggaaaacaatttgacagtttcctaaaaaagtaaacgtgccactaccttacaacccagcaatggtacacccgggcatttgtcccagataaatgaaagcaggtttgtagaaaaatctgtgcacaaatgtttattgcactttttttcttaatatccccatgctggaaacaactcagatgtccttcagtgggggaatggatgaaatgtgacacagctggctgggcacggtggctcacgcctgtaatcccagcacttcagggggctgaggtgggagatcacttaaggtcaggagttcgagaccatcctggtcaacatggtgaaaatccatctctgcttaaaatacaaaaattagctggatgtggtggtatgcacctgtaatcccagctactccggaaggctgaggcaggagaatcacttgaatgagggaggtgaaggttgcagtgagctgagatcacactactgccactgtactccagcctgggtgacagaataagacctgtctcaaaaaaaaaaaaaaaaaaaaaaaaaaagaaaaagaaaagaaagaaatgtggcacatccatatcatggaatactactaagtgataaaaggaacaaactattgacgcatgcaacaatccaaatcaatctccagagaactgtgttcagagaaaaaatgcagtctcaaaaggttacataccatatgatttcatttatataccatttttgaaatggaaaagtcattgaaatggggaacagatgagtggcagccaggggctaaggaggggattggggtaggaagtgtgagaggctctacaagcacaatatgagggattcttgtgatggaaatgttctgtatcttgactatattaatgtcaatttcctggttgtgctattgtgctgtagtgcaatacgttgccattaggggaaaatggataaatggtacatggggtttctctattattacttacaacttcatgtgaatctacacttatctaaaaataacaagtttaatttcaaaaagtgctaatatccttcaaatacctgattggcacaaggctaaagctatttcagcgtttgctgttattagtagtgacagtatattaatttgttggccttttaggtttccagcttcatggatgataggaggtgaaatctctacccctgtgggttgaaagtgaggcagtggttaggcgggtcagcccctgcagaagcacctagaagaagcctttctgacctcttgaacttccctgtctcagtgtcagggagagctccttcttggcctccagaggactttacacactgttacaaactaattttagctttctcagaaagacacagatctctaagatgccagttcttcccaggagctgctgtttgaatcctgcagctacaggatttacctagctttggagaaacaagtctcctccccagttctctctggagggatttaagcagaacctatggcctcatttgcttccacctgcacatggatgacatcaaggttagacctgtgattggaggagaaagatgtctcattcatgttgccatgctttccagatgccccacagtactttctttcttgggaatgtcactaggatactgtatgtccagtatctctcagctttctctctggaatatcagtatggcgccacatcccagaaccctccattgccctccctctggaatgccattagaatattcccaggtttccctttggccctctgtctgaaggccctcgtgcctcagtgatgtttgcatttgggctagtggttatcagcgagggatgatgccatcccctagggggtgggatgtttgaaaacagtcccagactattcacaattgcaaagacatagaatcaacccaaatgcccatcagtgatagactggataaagaaaatgtggtacatatacaccgtggaatactatgcagccataaaaaggaatgagatcatgtcctttgcagggacttggatggagccggaagccatcatcctcagcaaactaacgcaggaacagaaaaccaaacactgcatgttctcactcataaatgggagctggacaatgagaacacatggaaacagggaggggaacaacacacactggggcctgccgtggggcagggagggagagcatcacgataaatagctaatatatgtggggcttaatatctaggtgatgggttgatagatgcagcaaaacacgatggcacatgtttacctatgtaataagcctgcacatcctgtacatgtgtcccagaacttaaaaagaaaacagtgccagatattcggttgtcaacatgaaaagccactgcctctgccacagtgtgtctggcacatggaaaacagtattttccttctcctgctccttggcattcctgcatggagtgttttcctctagcttttatcttcattgtaaccacactacaacatgatttaaaaagccatgaagtctaaacatgcatgacggaatgtagtgttgacatcaagaaaaacttctaacgaaggtgatccagcccctatttaatgataagcatcattgttgccatgcttcagggtaattaggcacacattgcatatgctgcatgctcttcacataaatgaaagcaattactctctccaaacaccaggctaagtactcctagagttaagggaatgccggctgggaagaagaaattgggactcaacaaagcctccattcttgctggaggaaggcatttcccttcctggtctccatctgggtctgattctcacattccttaaactcataccagaactaataccaacacaggggactcaactgttaactgtcctatatatcctacacttatacttgccttaagaaccatcttaaaattcagattcttacccagtttagcctggcctatctccaaaattagcaagattttattctggtaacggaaaattgctcacatgtgtgggtttccagctataagtatttcccacattcagccccaggaacttgctcttcttctaaagtggttggaaaggacagtttaagcagatacgaattcactcccacaagacactgaaaggtagtttgtctctggagctggagagatttgggttcatcttttagctctgttacctaacacttctgtaatttgaacatgtaacttacctccaaggccattaactctcaaatgtggacatactcatctcgctaagtttgttttgaagtttaaaatcatacatattcagctcttggtacctattagacacttggtagctatgaactatgatgatcacaattcagacagaagtagagagatgacagccaaagctccatgatcattgctgacatgtgtaaacttgatgtctgctggggttaccttatcccttgaaatttaagtgaaattgactctacctttactccatatatggtgggagagccagagtctcttcccatccctcaaggactctcagcagtatggtgcagagcagcttctatgaattaggcttctcggatcactctgcatttgtgtttctccttttgtgaattagatcagttttggggtcacttggctgttttgcaagcactggcctgagtcaaggttatatttgtcagattggtggtaaagctttaaggcaacagaagagatttgtgtgataacctccctaaaacctaaactggaatattagacatccttgtcaaaaaaaaaaaaaaaaagccctctgaccaccttgccatcaggaacttatcactctacaggtgccatcttcccgttacttagttcccttttcgtttctcattcctctcctcttatctcagcctaaccatcctccacctgcctcctaccaaattcctgttaaccagagagagactctacctataaagccatcttcttccatgaggggtctttctgcacataaagtagcccatcaaagcattttcctatcaagcttggttcctaagagggtctttgatgccaatctgttgaaataacatttttattccacaatatgtagaaattcagaagcacaaaaatcttaggactctggatcagggttgccatatatggttttgcaggtcgtgcactgaacaaggatgtctggccaagaaggtaagtagtggcccaaaaggtagctggttctctactccccaagccatgtaccctttgatattaggtacatccagaagggtagtttttcctgtgttagccactgagatgggaatagctttttctaattttctactaggcggtgggggagtggtaatggtggtactttcttctaatttatctgtccagaggaagcacagttttctaattctcacaaaggtgttgtatgtgctaacagtggcctttttttgctggaagtcagtgcgtttgcaatgaaactgggtatatcaaagctctgagttgaagcaacacagtgtcagtaactgagtgcgagcagcagtgaggctgtgtcattttcagggaaagacatctgccgtttccctggagctgtcattgggaggtatcatttgcatattaaacaaatatttaagattagtcatgcagcaaacaatcaaaagtgacatcacaaacatcactccctcaaacaacagcggagacgaaaatgtccctctaggtgtgctcatctggatggcaatggtgtgatttgagccggaatcagtttctttgacaggtggacttttcaggtaagaaagaaaaaattagaaaacagtagaataggatagggactttatatccccaatctcagaaagctattttgagggctaaatacttttagaatagtggctggccactgtaaaagctcaataatattagctgcaactattattcccaggatgacagccgaaatatttacaaactgacccatcagaatagacaacacctatacacaatcgggttttctgaccctatttttctcccttgatcaaaacgtattattgaaataatagcctaatgtcttttgagcagtttaaagagctttacacattttattatatcgtattatttattgtgagtcctttatccagtagggaataccattacacccaccttactgagaaaactgaggcaaaaaatgtaaagtaagttggctaaaggtcacattgcacgtggtagaactcagacgagagctcatgtctttgaccactgtgctatactgtttctttctttctttctaggcatggtgtaagaagatactcatcttctttgatttcacaggaaagccctttttattttttctttttctttttttttttttttgagatgaagttttgctcttgtcacccaggctgcagtgcagtggtgcgatcttggctcactgcaacctctgcctcccgggttcaagcgattttccagcctcagcctcctgagtagctgggattacgggtgcccactgccacactcaactaaattttttgtatttttagtagagacagggttttgccatgttggccaggatggtctcgaactcctggcctggaaagcccttttgatgatgtagtcattgtacctggataagtaacattttttaaccactttatgttcttttcctatttttcacttgttccaccattgtcataggatttttatagttgggaaaagagtgataaataaataaaatgttagtaaaatttaaagaagaaaataaatgaaagccttctacccaacccatgggactattgatttatgtcattaattagaatgctctcttaggcatgaacactgcatatccattagctcatttcttcttcacggtgtgccaggagggaagggggttcatgtctgtatttaaatgaggttaaacatcccccacgggagtggatgcaagatgcagggagcgtactgacgagcagactcggtgctagagcccctggtcctccagagcctccatcattcatgctctctgtgtttagaagaacctgcctgtgttgacagagcagcagcaccccgcttttgtgatatgaggtgactgtttattttttctccaactgcagcaatatttatttttaattagtgaatataagaatgatgtcgggtgcttgtttaaaatgtaaattctcgccttgagaaatattgacttatttgaaatagggtgggtcccaggagtcttgcttcctataatgcatcttagaaagttcagttagagttttccttttggtttgttttggatgaggaatggggagatacagacttactatcttttctatgtcaggtctgggctaagcatttcagaaatattttctcaaataatcctcacaaacgtcatcattacaaccatcttacagatgagtaaagtgagcctcaaagattaagccagcgtcagagccagagtactgacccagacctgccaaactgcaaagcctaccctcttgcccggcatgttaacagtcatttccaagttgaagtcactgaagacttttgctaatgtacctattcccagactcagcctaaaatcatcaaatttgaatctgaatggaggacatagaatctgattttttatcaggtgacccaggtggcatcagatgcacagacaggcttactcccaatgcttcggttccagaagggctgttgctcagctggtgagcactaacacagtcatctaacttagttacagattgaaatacctccattctgattggtaaatacctgctctcccatctctctagtgcccccttcacctcctgtatcatcccagccattcaccgaagattttccggtatcttgcacatagaatgctgttgcctgggtcactgagtctgcaggggtctgctccagtgctggaagccattgtttgttctgatttgtgggtgtgatgacatacatgttgccgaggatttgaaatagcacactgggtatgggtgcatcttcctcattagattgtccaccctagacaacaggaaacatgacttatgtgtctttgcagtgcaattgaggccctagacagagttaaatgttcattaaatttagggttttttttttcttttttttgcacgatgactgtcatttttcttctcactgcattgtaatgcgggcctgcatagaaggggctatggcggaggatgggggtggcgtggggagaatgaggggaataggacccagagctgattcctggaggctgcatatcagggtggacctgggacattcaggacagaataaggtctccctctaaactttcagggatactggaagatgaaaaagcagcgaaaaaggctgaaagagaaaatggggtacttggcagacaacagatcctcaaagagacatttgctcagtgttaggtgagtgaacataatgagagaattgcaattgggcacatttttcatataatctacagagaagaaagggacctgtgggtagaagtatgtcagtttcaattccactgtagcctgagcaggtggaaaagacatcagattctcaggaaggaacccattaagccaaacaaacgtcacagtagccaaacattattggctccctgacttccacagataactttggagatggttatttccttagctgaggaatcatggccagatattttcaatgtaaatgagttttgcaacctctaacatgtttgaggaaaagaaatattttgacattccattccaataatagataatgcagaataatctcttgggtaaatcagcaatgtggaacaatttgctttgtcatcaaaaagctgttttttctctcccaacccttgccttttgtttcagaatatgatctcccatactactcttggcgcttcacaaacatactaagaaatttaggataatatactgtacatgcatttgtagcagagagttgtgtttctgccctgctggcatgtccaccgacttccttggcaccagtcaggttcactgatcagaatgttgcagtggaatctgaggatgcctatctaattaacccctgattatggcaaaatgaggtttataatagaggagagtgtgccaagactacatttgggagacatggaggaaaaatgaaaagtaaaactgtaaccaagccaactcagagcatgagaaagaaatcaggacagaatgcaagcggacgaccagacgactccccgcagctcagggccaggatttccaagttgaggtcaactttgaaaataaattctccaacctggccatcccctgcaaactcctagccatccaagagcttcctggcaggaaaatgaatgcagtgtcagttctttcctggagggatgattcccaaggcaactgtggggagtcggggaagtccctggtcccaaggaaaagcaacagtggtagagacagggagttgaagccccacatctctgcttcttcccttactgtttccactccccagtggaaaaactaaaaggtatgaaccattctggcagggaaggttttccattctttgttgcaaaaatgagctggtttcatgtcctttccacagcagtggcctgttgcttgagaatgaagtcacagggcttgcggatgtctttgaaacaacatgaagagatttcttaacacagagagccactcctaagtgcccagagaaactaatgtcagggagatattaactaaaaaaaaaaaaacaaaaaaaaaaacaaaaaaccacagaaccctctattgttttattcccagttccccaaaataccatggttttctatcttgaaatgagcagagaatttgttgtttggaagatctgggtttaaatcccagctccatccctccttggtgagtgatgctgggcaaatctctgactttatctgagtctcagctgtgaaatgggggcggctatttctgatcagtgctgctccagaggtctcagatcagaagagagaatgggcttctccccagttgtaccttatactttatcatctgcccatgaaatagctctgaaaatatccagagctcaaaaatcccctaagacaaggtagtttgtacacttgtagcacatgcaagaaatgtgcactctaagaaggagaaggtagacatcaagcggtcccatccatggtcaaagaatttctcctgctggcattttatctagcaacacatctgccccccgttattccttgattctaaaacaaaagcctccatgtttatcaataaatgcacacaattcctgaagggaaaagagaaaaagttacaacatcctgtgtctgacagcagttggcccaggtgtcctgacactttatcatcatcatggtcatcatcataattatttattattaatgttttgatttaaaaaatatgcctccaccttgctgttggctaaaaactgttgcaaactttcagagcaaagaaacgtgttgatcttcacaaatagttccattcttcaacgaacacagaatgaacatgaacatattttatattttcacagtgaattttataagagaagtcaccagaccaatacagcatcatgctgattaaatgagagagtctaaaatagtggtttttacacctggctacatattagaaacaactggagagcttaacaaaaatttaaaaaagtccaggcacttcctctaccttgagatcctgatttaattagtctggggagggccccaggcatctgtgatattacagcttctaagatgattctaacatccagacagggttgagagttactgctctaaaacagtatctggtggggttttttttttttttaaggtgtcagatgttgacatttattatatgtaaagctctgatatccagcaaaagctaactataatgtcctgagccccaaggaatattgggtataatttcagattcagacagcccgacataggtagtaaagatcatttaactgagaaagttgtgcatgcagatttgctgagataatctgggtgaattagctcagcaaatctgcattcacaacttcctgacataaatgatgggccatctaactttgttcatggctgcattctctggtggccaagaaaagactagaaaggctccttcaagaagcaagaggtgaaattgacaaggaaacacaatccttctgaatcactgcatgcttcctttaaaacttgaccctgacatagcccaacagaacacaaatttaatcatctcttgggctggctatgttagatccacagtaaggcgatctgaggatccttccagaaaaggaagaaacctaagtctcaatctataacctctaccattgcatctttactagtttataactggcctgaacacaatttcaattgaatcttgagtgattcttcccactgagctaccttagaaatagccatggcccatctagtgatgtccatcaagacctgggaaaagcatccccgcctccccctattctcctctgccattctctcatatacctcatcaccttgatgggtacttccccagtctccttctccaatgccaaggacactgcctcacaccttgcttccttctttagggtagacccttatatcactgtaaaacaaactctgtttttcttttgggtctgtatgatatggtttgaatgtgtgtcccccctaaatttcatgtggagatgagacctccagtgttggaggtggggcctcatgggaggtattgggtcatgggggtggatccctcatgaatgggttggtgccatccttgcagtaatgagtgagttcttgccctgttagttcatatgggagctggttgtttaagagcctggaggcttctcctttctcccttgctccctcccttgctatgtgacccacctgctccctcttcccttccactatgagtaaaagcttcctgtcacctcactagaagcagatgctggtgtcatacttgtatagtctgtggacctgtgagtcaaataaacctcttgtctttattaattacccaggctcaggctggatgcagtagctcacgcctgtaatcccagcactttgggaggccggggtgggcagatcacttgaggtcaggagtttgagaccagcctggccatgacagcgaaaccccgtctctactaaaagtagaaaaattagccaggtatggtggtgcatacctgcagtctcagctccttgggagactgaagcaggagaatcacttgaacctgggaggcggagtttacagtaagacgagattgtgccactgcactccagcctgggtgacagagcgactctgtctcaaaaatgaataaattaattaaattaaatacattacccagtctcagacattcctttatagcaattcaaaatggactaatgcactagagtagatttagttgttagtcttaattacttcctctcctaggatagtatcaggactaaatctaccttccttgccatatcctcatatatggcacacagtgtccgatgtctttgaggttggccatatgagttggttttggtcaaccaaactcatatggtttggttggttgaaatacactagtataaacttgcttttgtcaatgctgttatataagcctgccctggctttcctgctggtccgaagaggatgagagatatgtagaatggatctgaacccagtttgctgcttcaagcagagcatagcctagatgtgctgaaccccagctggcccacaaatctgtgaacaagaaatgaatgtttgtggttggatgctactgagtcttggcatggtttcttacctagcattactatgacaatgattatctagtacagtacccctctatctaagtgcatagcctttaaccatcagacttttctttatttgatacattaaaaaaatcatcctttggtgccctctcattgtttagtctccattctgagctggtatcttcagcccttccgctccattggctgacatgtccacatcttcttgctgtctgatccttgactgttgatagccttatcttgctctgtggaaatggtgctcttggctgcctctctgattctaactccagtcctcttcaagcatgaattgtatttggtctgttgtctgctttgctggcatgagttaggcatcttttgtgaatactgtgactctacaactctcagagccccaaaggcagatcctgacctggactcaccagttcctatgaatggatccaaattcatttccattttcccaactttgtcttaagcacacagtggagaagcagtacaacctactggttagagcacagactcaggaaccaaggtgtatgaagttaagctagcatttccatttcatcacctgtaaactgggtatggaaatgaggattaattcatggagatcacttaacacagcctggcacgtagcaagaactatgaaagtttttgctattagcatcatcatcatcacactacacctccctcaaactgctgcattctacatccagttctctcaatatcctaccctgtgaccgcataaaacacatggatattcaaccaagaattcttgtttaagcaaatcattgaaaaaataattttccctgaaatgtaaatggtggcttcatgcttcagtgccacacttctcaatctaaagtatgcacatccctatagtatatatatatatatatgtgtgtgtaatcctgtgctagcaagttgtaggaagccatggaacaaatatggtgcaaagttctagaatgttcattttgcttggcaataagttattagaaacactacttttgtctagtggggttaaaaatgttttactttattagtttgaggagaatctctcttagggaagaaattacctatcttttaccgaaaggcttgattagccttggaatggaaagtaaggcccctgagcttaagagtcaagacaaatataaaagttaaggatctttttggttccaagtgattgaaaacccaactcaaatgggccttaaaaacaaaggagatttattcatacttgtacctaaaccccaggaagatctggtcaggtaaagcttcatctagtagctcaagtgattttaccatggacctaggttgttctctattctgtttatgttctatggatttggcctcattcttgggttctggtggtttctttcccttcagctcttagctctcttcctgtgataataaaatggataaagttgttcctatcttataatacattgtccagagaaaactcatagctctcttttaatattttcaactacaattttgagatttcctctctctcattggcccaaattgggtcatgtgctcaactccgcaccaatcactgtggccagagagctggaacccactgattggcttaagcttgcagagtcaattcctgtaactggagaatggagttaaatctacccaaacaataggactgggaatggaagagggatgtaaccaccaatgaaagatccgcatgctcttgatgggagaaaaggacatggaggtttgggtgggaacctgcaattatctagtaatccaatgaaagagatgactaaacagcttgcagaagatgaagggaattagtttttgcacctgatgagaagaacaattaccaccaatgaggtgtgaaagcatgtatatatatcaaaggacatttactattcaatatgtttatgttggtgtaatataaactcttgtgggagactggtaaatgcttaacaactaggtctctggggaaacatacttaagtttcttagaaactttactgacctaaagaatatgtaacaaacagtttataataataaattttacagtattctttgtcatatagccagctgatacttacagaacactttcttggtttttgcagaattcttatatgtataactgatctaagattgcaattcaaccatcacttgataaaatcaggctacaaatcttgaatgcaagtgtagtttcaacatgaatgttggttaatgttatatattaatgaataagatacaagggaaacaaagaaaacatatattagaacttcactcatttgtcaatgatgtgaatgacttctttgctgaatcagcaaaaagtttttaaatgctgaaaaaatgtcttcagtttttatactattgacaatgcagtggctatagacatgacacatttaagcttatggacattattaacatattatccattaatttttaggtccaggcaatcagcagagcaataaatcaagcctagatttgtagcatttgccaatttctgtgatgtaaatactcttgctatggccaatctcaggttacccatgtataatcactaaacacagaattgggtagagatgggcaatagcaacacatttaattgtatttctactacacaaatacagtagatacaaataacttcaagggcataggtaagaataaaatgtagtaaaacagctagtaagtgatgagcttctaatacttactacctttattaattgtacaacttaattacaaccttatataatatttaatcatggttttgcttaacaactggattgcaaaattcctaaaaatttaatggctggctctcatggccctgtattagccagatccagcacatcactgcccctcacccatgcatttctccccaaaatactctttatgagagtgtactgtataaaacaataccttatgagaatggattttagtggaaatcaaatgcaggctcactttatgtgcatgaaaaattagagatgatacccatgaaatggtgaaaggatctagaaatagaacaaacaaatagttctgcatggctgggaaggcctcaggaaacttataatcttggcagaaggggaagcaaacgtatccttcttcacatggtgacaggagagtgaagtgtcgagcaaagggagaaaagccccttgtaaaaaccatcaaatctcatgagaacgcactatcatgagaacagcatgggagttactgcccctatgattcaattacctcccaccaggtccctcccgtgacacgtggggtttatggaaactgtaattcaagatgagatttgggtggggacacagccaaaccatatcaggatataagtactcacacgttcaaccccaccagggatttgtagaaatcttgggaaagactgtatgtgtcctctgactatagcgtgggctgttctaggcaatgtaacagatacacacatacacacaattgtacatacacatatatacacacagatatatatgtatgaatatgtataagagtatctgtatatgcgtgtatatacatctatttgtatatatgtcaccgttagaatggaatccaaaattatatcaatttttaagaccaacaaaaagattccagagaaattcccctttaggaagccaccttggctaaaatctccagtttcttgggagtatgtctccttctctgctatttggaatacctagtgtgttccccttccctgaaaattagtgttttgcagctagtcttactattttaatcagatgactcctgggccttgctagtcatcagaatctccctgagggctttgaaaaatacaaattccaggatcccactcatagaggttctgattcagtagatctaggactgagatgagaatctgaattctaaacaccttacccaggtggcccagctatgttggtagaagaactgctgggcaggtccagggtctagctttgaggtggagttctgccctgcatcgcgttacccggtggtaggtcacatctcctcctcggatagtttacttttcaagctctgaccttcaggtcagtaatgtgcgtcttgtagggtaagaggacctctcactctctgagtgggaaggttctttccatcttcacatcatcacagcccggtctgcatggctggattccatttgacagggagaaagaattgaactccctttttgcagtgagatgtgctgattggaataagctttttaatttttttctctaacaaggaaaacattggctcaatttgcctgaaccagaggggctctgtgcgtcagattttattccagatagaaaaaaaaactgagtgtgaacttataaatcagttaaaaaaatgattaatctgcctcacgggatacaccatactctgactgaatgcagggagggtaagagagccccaagcatctaatttaacacctgcaaattcccaagaaagattataccatggaaagaagacatattgaggattttaagaaaaggtttaataaaaaaatgtaaaagcaaaggccataaaattcaaatgaggctcactccccaggttataacaagctctgtgctcagaccttgttaatagcttttttaaaaaaaaaataattttattgtagcttctattttttctgtcgatgtaattagagcttaattaattctccctaaaggggaaaaagaggacaaaatggtatttgatctgagacatgtacaacgggcaaagtaattaggatcagcaagttaccttctgttactttttttcctcgttagctcttctgggaggaagatagctctggacagagactccctgtgtctccccgtggatcagagatttggcagtgtcaggacagccattagggtgaaaagattttatttacatagagaccacaaaataaaagaaaaaaaagaaaagaaatcatagctgtcagagtgctgcatcaattctctggtgataatgagataataatagttaagttttgagtgtgaaatacagtgcagagtaccagaagcataactcacataggattgcagaaagaacttagtcatggactaggatgccaactctagcactgatgctgtgtgagttccacagacctctctgggcatagtttcttcatttgaaaaggaaaatagcaatactgcctaattgaaatgttggttttaagaagtaaatgaggtcatgaaacaaaaagcaccaggtataaatggtagtatatattttttttgccctggtttcacaatatagtttagtggaattaatctcgaacagttccaaattttaggattaattgccttcagcttgcatggcaatgacttattataccaagactgttaatgtgacctcctgtggctccataggctcaggagaagccactggcagtacaggtatactgcctaattagagaaaaaataatgtgctcaagaatgtcagtcaattcacatgctaggggccagcgaactgaatccaggcactggttggacccactgcgtggcagaaactgatctgggttggggtgagagtcagaagaggatagagagacagacatttggcttccaaaagcaagcaagcaagccccccatgactccagcatcatgtcaagacctccaagatcatggtgacaaacaaagatctcttcctccaatcccccaacatgctctgggatgaaaatctggagtcaggactgaaatcagtttcttgcttcctggcctatgcgtggtgggtacctctgcatgaagtgttgacctcacctgcttcattgaattaatccctcctttttcttccacatttctgctctctgagcaagtcactctgttgtcaacctcctccccccgatatagtaaatctaggccatctgtttgttataagctcttgtatgcccctgtagcactttttaaataggaaagtttatttaattaaggtctgtaagctctactggggcagggattggtttgttgctgttgttgctatttagtgagttggttttgtttacctccacatcctccatttccagtgtaattttgttgaatggttaaacaaatcagaagatggaaagagagaataggaaagaaagggctgaatcagcaatgagaaaagagtttaaggagctgagattattcattactttcttcctcttctacttgcccctacctactcccattgagaccctgtctactttattccttacatatttcccagttctccagggagatttctgagattctccacctccttattcagatcaaggtcttttttctgaaagatcaatggactttttttggaattcaccaaaggagatgctgaggctagaattttactcttcatcatcatttgaaaacatatcccagattggtaaggttcacatatatcttcatggcccctcccatggcctaactatgcctcagttcagcgatcagatgatcagttgaggtgggcttagagaaagggagagagaaaagaatcacagttactagattagcttcttggcttgcatggtttgtgtcctccaccttatccttctgtaaaaagacaacttttcctctgttgatagctgctaattcttgttgatgactcactaatttgttgttgttgtttggatgcagtgcactaacagagactgaacaaatagcacacagacagttgtctttttttttttttttttttttttaggctgagtctcactgcgacacccaggctggagtgcaatgacatgatctcagctcactgcaccctccgcctcccaggttcaagtgattctcctgccccagcctcccaagtagctgggactacaggcacgtgccaacacgtccagctgatttttgtatttttagtagagacagggtttcaccatgttggccaggctggtctcaaactcctgacctcaagtgatctgcccacctcagcctcccaaagtgctgggattacaagtgtgagccaccatgcccagcccagttgtgtcttatgaactatcttgaaaatttattttgaacatcatcaattcttcattcaaacaagataaaataacattaatacaatttagtttgaaaacatctaaaaccaacaagaacagaaccagacacaatatatgcaatgacaaaatagtcaataaaagttgtccatgaggaagcccggatgttgggcctacaaggcaaacactgtaaataagctatcttgagtatgttcaaagaactgaagaaaaccatgtctaaagaaataaaggaaaatatgaaagcagtatctcactacagagagaatatcaataaagaaagatcaatataaagaattaaaattcttgagctgaaagtaactgtaactgaagtgaaatattcaaaaaggagtcaacagcacatttgagcagacagaaggaatagtcagtaaactcaaatacagtaatagtattaatagtttaaatgggactatccagtctgaggaacagaaagaaaaaggaatgaaaaaaaaagaagaaaaaagacttagaaacctgtgggacaccatcaaatataccaacatgcacatactgataacccagaaggagagagagagagagatgcagaaggaacgtttaaatgtatcatgttcttaattcacacattgtatgaaaaacatacatttacatccttccacgtcctggagatttggtgaactccagctaggataaacacaaagagatacacacataaaacattatcaaactgttaaaagacaaaaacaaagagaatcttgaaagcaacaagagagaagtgactcatcacatacaagggattctcaattagattaacagcttatttctcacccgaaaccatgtagtccagaaggcagtgaggtgacatttgaaaatacaaaaaagaatgtcaaccaagacttttacatccagcaaaactgtcctttaaaaatgaaggagaaatgaagacattccaagatgtacaaaaactgatagactttgtcactagcagatctgtcctacaagaaatactaaagggaatctttcgggttgaaattaaacacattaagcagtaactcaaatccacatgaagaaataaagaatgctgataaaagtaactacataggtaaatataaaagacaatataaatgtgtttttgtttgtcagccttattttctcatatctgatttacaactttatatagcaataattataaatctgtattaacaggtatagaaagcataaagatgtaattagtatgataacacagcaaagaaagtgaaccaaactatataggagcaaaatttttatgtgctattataatacattgaggttaatctaaactatattattataaattaagatattgattataatctccaagacagccactaagaaaataactaaaatgcatgtaggtatatgtttatgtgtttgtgtttgtgtgtgtgcggtggtggggggtgtgtaaagaaatgacaagggaaataaaatatcgtgcaagaaaataacgatttcatatgagacagtaatggaggaaatttataaacaaaagacataagacacataaaaaacaaatatcagaatggtaggcataaatcttactatagcaataattacattaaaaggaaatattaatattaaaaagcagagattggaagaatagattttttaaagagcattatccaactatatgctgagaataagatacatacttgaattcaaagacatggtatgttgaaaataaaagaatggaaaaagatatgctttgcaaatgtgatcaaaagatagctggaatgatgatgctaatattagacaaaatagacttaagacaaaaaattgttactagagacaaaaatattttataatgataaatgggtctatccatcaagaagatataaaagttgcaatacatatatacctaacaacagagaccccagaaatatattttaaaactaatagaactgaaaagagaaattgacagttcagcaataatagttgaagaattcaatacccacttttaataatggacagggcaattacacaaacaatcaataagaaaacagaagacttgaacaatactagtagatagtatagaatgttccaccccacagcaacagaatgcacattttccttaagtgcagatgaaacattctccaagatagaccatacgttaggcaacaaaacaagtctcaataaatttaaaatgattgaaataatacaaaatgttttctgactaccatagaatgcagttggaaatcattaacagggagaaatttagaaattttataatacttggaattttaaaatatactcctaaaacaaccaaagaagaaatcacaaaggagattagaaaatacgttaagatgagtgaaaataaaaccacaatgtgccaaaacttatgggataaacctaaatcagtgttcagagaggaatatatggtatgaacaggtattcttgaaaaaaagggtgttgttcaagaggagaagaggatgtccaattaaaagcctaaccttccaccttaaaaagctagagtaaaaaggagtgtcggggtagaattcaaggagtttcagggctgtccatgacagtaacacacaggctttataaggtggtgctttgacagaattgcctaggagaggaagttgctggcaacatgagacattcccgaggtttaatcctaggaggccaccattctaaaggaaatgggggcaaggttacttctaggaagaagggggttggggagaaagagtttacatatgtaggtaacatcctcagtattatagcaggccgtctttacatctgaaagctcccaagagcagtagcagcttggagtcttataactacaaggctttatcttatccattgctagcagatgtgggtattaatttgctaaggctgccatcagaaaacaccacagactgaacagcttaaaaaacagaaatgggccggtcgcggtggctcacgcctgtaatcccagcacgctgggaggccgaggcgggcggatcacgaggtcaggagagcgagactatcctggctaacacggtgaaaccccatctctactaaaaatacgaaaaattagccgggcgtggtggtgggcgcctgtaatcccagctactctggaggcttaggcgaatggcgtgaacccgggaggcggagcttgcagtgagccgagatggcgccactgcactccagccgggacaacacagcgagactccgtctcaaacaaaacaaaacaaaacaaaacaaaacaaaacaaacaaacgaaacacataaatgtatttcccagaggttctcgaagctagaagtccaagatcaagatgtcagcaagtttggtttcttctgaggcctcactctttgctgggcaaatggctgccttctcaccatgtcctcacatagtcattccttagcctgttctgtctgtatcttagtcttcttttcttataaggatgacggacatattggattacagtagagtttaccctatgactttattttaccttaatcaccactttaaaggtgtgatctccaaatacacttacattctgaggtattaggggttaggacttaaatatatgaattttgggaggacataaattagccaataccaatgcaaaatgagatttcatagggcatgcaaagcaaacagaccctaaatagctacaaagctatttgtttgggctatttttaaaacaaacggctacgtaaaaatttgagtttgatgctggaggggttttgagctaacaggtctcagcctgcagtgaagaaacaaacaacctaggggctaatatgcagaggccatctgtggctcattcatttgacaaagagcaaactaaacctaaaaaagcagaaggagaaaaatagcaaagatgagagtataaataaataacacagagcataacaaaaacagtagagaaagtcaataaatcaaaaattgatttttggaaagattaaaaaaattggcaagccttaactttgactgaccgaggaaaaagggggtagcctcaaattgctgaaatcaggaatgaaacagggaacattactactgagtttacagaaataaaaagaattcaaatattgtgaacacatgtataacaacagattagataatctatgtaaaatcgacagattcctttttttaaaatacaaaaatgaaccaggtatggtggcaggagcctataatcccagatacttgggatgctgaggcttataaaaaaaaaatcctacaaattaaatcctgggaccaggtggtatagtttgggactatatcactctgatatctacttcctcattacatctccttctctaaatctaccgttctttctccctcttataaaagacacttgtgattacattgagcccatcatgatgaacattctcaatcacatctacaatgttgcttttgccatgtaagataacacattcacagtttacagagtttaggacatatacttttgggggtcataattctacctaccacactctccaaaatgatctaaagatttcattcaattctcactgatacagacaggagacagaggtagaagaggacagttccccggcaaaggccccaccctcaagcctggaaacctgtggccctaaatgggaacaggcattcttatttttgtacccaaatgttgcctcttggcccaccatacccctctatcccatacccgcataaaccccaaaccccaggctccaagcacagatgagcaaatgaacagaagagcagaagaacagaagagaaggagagaagaaaaggaatgtctgaacatcaagaggagttcagctggggatggtcagagaggagatcggctgctggacagccaatgtgcaggggaagatcatcttctccatcccctttccagctccccatccatcccactgagagccacccccatcactcaataaaacccctgcattcaccatccttcgagtcgttgtgtgacctgatttttcctggatgctggacaagagctcgggatacagaaaactgtcgcactggccctctgccctcgtgaaaaggcagagggtccactgagctgtttaacacctacaccatccacggatggcaaagctaaaagagtgcactataacacatgcccacttgggctttgggagttgtaggcacccactcctagatgctactatggggccaaagcccagaagtgctcaccccagctcctgcacctgcctgtctgcatactccccctcccataaggggtttgaacagaggtggtggctgaaaagacgagtcacacccctgtcacaggtcctgagatggggcgggggtcagggaactctcccatttcattatcactataccagtgggatttttttttcagaaattgacaagataattagaaattttatatggcccagaataaccaaaacaatcttgaaagaggaaagttggacttaacacttcttaacttcaaaacttgcttcagagctgtagtaatcaagacaatgcggtactggcataaggctaaacatacagatcaatggaatggaattgacagtcccaaaataaactcttttttttttttagatgaagtctcgctctgtcaccccaggctgcagtgtagatctcagctcactgcaagctctgcctcccgggttcacacctttctcctgcctcagcctcctgagtagctaggactacaggtgcctgccaccatgcctggctttttttttttttttttttttttttttgtatttttagtaaagacgcggtttcacagtgttagccaggatgatctcgatctcctgaccttgtgatctgcccacctcggccttccgaagtgctgggattacaggcatgagccactgcacccagcctcaaaataaactcttacgtttatagtcaacttactttttgataaaggtgccaaaataatttaatgggaaaagaacagccttttcaacgaatgatgttggacaatttgatactcacaggtaaaagaataaattttgcataccatatgcaaaaattaactcaagatctgttatcaacctaaatacgggagttaatataaaactcctaggaagtatataggcgtatatctttgtaacatgtggtaggcaaagccttcttagatatgacaccaaaaaaaaaaaaaagatgagtgacagaatagataaattgaacttcatcaaagctgaaaactttcgtgctttaaaaaagaccatcgaaatgggtaaaaggcaaaccacagaatgggagataatgtttacaaattctgtatcagataaggactttgtatccagaatgtataataaaaagaaatcttttgactcaacaattaaagcaactcaattcaagaatggagaaaggatttgagtaggcatttcttcaaaaaagataaatggccaataagcacacaagaagttgttcaatatcattaatcattaaggaaactcaaaactaagctataatggaatattacttcacacctgttatgatgactgttttttaaaagacagacaataacaaatgttggtgagaatgtagagaaattagaaccttaattactgatggaattgtaaaacggtgcaggaactttggaaagcactttgataatttctcaagctgttaaacgtggctttatatgacagcatttctactcctaggtacatatccaagagatctgaaaacatatgtccacacaaaaatgtgtacattaatgtgtatagcaacattattcacactacttaaaaaattgaaacaacctaaatgttcatcaacttatgaattaaaaaagtaaaatgtgacctatctatacaaaaaggaatattaaggaatgcaaataaaaaataaaaggaatacaaaaaggaaaggcatgaagcactgatacatgctataccacagatgaacgttgaaaacattatgctaagtaaaagaatactgtcacaaaaactcacatattttatgattccattaatgtaaaatatccagaataggcaaatccaaagagagaaaatgtagaatagtggttgccagaggggataaggggaaaagaagaataactgcataatgggtatgggatttctttgggggatgagaaaaatgccttgaaattagatagtagtgatgttgagcaagtctgaatttaataaaacccactgaattgtacacttaaaaaactgaatttgatagtatgtgagttatatctcaataaaacttattttataaaaaatgaagttgtaaaatactcttaaggaataaggttgtagatgtgtggcattatttctgaggcctctgttctgttccattggtctatatatctgttttggtaccagtaccatgctgtattggttactgttgccttgtaatatggtttgaagtcaggtagcatgatgcctccagctttgttctttttgcttaggattgtcttggctatatgggctcttttttggttctgtataaaatttaaagtagttttttcctaattctgtgaagaaagtcaatggtatcttgaggatagcattgaatctataaattgctttgggcagtatggccattttcatgatattgattcttcctatccatgagcatggaatgtgtttccatttgtttgtgtcctctcttatttctttgagcagtggtttgtagttctccttgaagaggtccttcacatctcttgggagttgtagtcctaggtattttattccctttataacaattgtgaatcggagttcatttatgatttggctctgtattttattctctttatagcaattgtgagtcagagttcacttatgatttggctctgtttgtctattattggtgtataggaatgcttgtgatttttgcacattgattttgtatcctgtgactttgctgaagttgcttatcagcttaaggagattttggactgagacgatggggttttctaaacatacaatcatgtcatctgcaaacagagacaattagacttcctctcttcctattgaataccctttatttctttctcttgcctgattgccctggccagaacttctaatactatgttgaataggagtggtgagagaggtcatccttgtcttgttctggttttcaaagggaatgcttccaggttttgcccattcagtatgatattggctgtgggtttgtcataaatagcacttattattttgagatacattccatccatacctagtttattgagagtttttagcatgaagagctgttgaattttgtcgaaggccttttctgcatctattgagataatcatgtggtttttgtcattggttctgtgtatgtgatggattatgtttattgatttgcacgtatgttgaacatctgatctttgacaaacctgacaaaaacaagcaatggagaaaggattccctatttaataaatggtgttgggaaaactggcagaccatatgcagaaaactgaaactggaccccttctttacaccttatacaaaaattaactcaagatggattaaagacttaaacgtaagacctaaaatcgtaaaaaccctagaagaaaacctaggcaatgccattcaggacataggcatgggcaaagactttgtgactgaaacaccaaaaacaatggcaacaaaagccaaaattgacaaatgggatctaattaaggagcttctacacagcaaaagaaactatcaccagagtgaacaggcaaccaacagaatgggagaaaatttttgcaatctatccatctgacaaagggctaatatccagaatctacaaggaacttaaacaaatttacaaaaaaaaaaaaaaaaaaaaacaaccccaccaaaaagtggccgaaggatataaatagacacttctcaaaagaagacatttatgcagccaacaaacatatgaaaaaaagctcatcatcactggtcattagagaaatgcaaatcaaaaccacagtgagataccatcacacaccagttagaatggtgatcattaaaaggtcaggaaacaacagatgctggagaggatgtgaagaaataggaacgcttttacacagttggtgggagtgtaaattagttcaaccattgtggaagacagtgtggctattcctcaaggatctagaaccagaaatgccatttgacccagcaatcccattactgggtatatacccaaaggattataaatcattccactataaagacacgtgcacacgtatgtttattgtgacactattcacaatagcaaagacttgggaccaacccaaatgtccatcaatgatagactggataaagaaaatgtggcacatacataccatggaaaactatgcaactataaaaaaggatgagttcatgtcctttgcagggacatggatgaagctggaaattatcattctcagcaaactaacacaggaacagaaaaccaaacaccacatgttctcactcctaagtgggaattgaacaatgagaacacatggacacagggaggggaacatcacacactggggcctgttggtgggtggggggttaggggagagatagcattaggagaaatacctaacatagatgacaggttgttgggtgcagcaaaccacaatggcatgtgtatatctatgtaacaaacctgcatgctgcatatataccccagaacttaatttaaaaaattaaaaaaggaatagaaggaaagagaaacaaataacaaataggtctaatgaaaaacaaatagcaagatgagacataaactacattaataatcatattaaatggtctgatcatccttattaaaaggcagcaatgtcaatgtggatattttcaaaaacaagacctaaccatctgctgcctgcaagaagtgccctttagatgtaaatacacaaataggttaaacataaaaggatagaaatagatatgccatgcatatactttttataaaaggcaggagtagttatattaatatcagagaaagtagatttcacagcaaggaataaagaaggttccttaataaggggatcagttacttggagcttgaaaatgcatgaagcaaaaaccaatagaaatgcaaaaagtattttacaattatagtcagaaatttcaaactcttgtctcagtaatggacagaaaagtcaatggaaaatcagcaaggatatagaagacttcagtaatactattaaccatcttcactgaattaacatttataaaacactcccttccacagcagtggaatatacattcttttcagtgtgttttgaatgtctccacagaacatttatcagtatagactatatcctgggccagaatacaaaagccaaaatacaagcaccaatatagttaaaaggattcaagtcatccaaactgttttctgactataatggaattaaatgagaaatcaatgactgaaagatccctggaaaaaaacaaatatttggaaacttaattgcgtcattctaaataacccataggtcaaagaagaaatcaaaagggaaaatgatacctttaagtgaatgtacatgaaaatacaacaaaaggtgtacattgtcattaaagcagtacttagggagacatttgtagtactaaatgcctaccttagaaaattataaatgtatcaaaacaatgacctcagtttccatcttagaaaaatagaaagtgaaaagcaaggtaaactgaaagcatactaattcaaaataagcaaaagaatagatataataaatatcagagcagaaccaaatgaaatagaaaaaaagcaaatagctgattctttgagatcaaacaattgataaacatctagccctactgatcagaaaaaaagaaggaagacacaaataccaatatcaaaaatgagacaggtaatctcattacggattctacagatatttaaaaggatacttgggtgaatattataaactttgtgtctataaattcactgacaactgaaattgataaatctcttgaaagatgtaacaatgaaacctcacttaagtgaaataaatcaccggaatagtgctatagccattaaagaaaattgaatcgtagcttaaaaactttccacaaagaaaatttttggctcagatggcttcactggtgaattcttctacacattttaaaaataattaacagcaggccgggcatggtggctcacgcctgtaaccccagcactttgggaggccaaggtgggcggatcacgaggtcaggagatcgagaccatcctggctaacagtgaaaccccatctctactaaaaataaaaaaaattagccgggcatggtggtggacacctgtaatcccagctactggggaggctgaggcaggagaaaggtgtgaacccaggaggtggagattgtagtgacccgagatggcggcactgcactccagcctgggcaacagagcaagactccgtctcaacaaaaataataataataataataataataataataataataataataattaacagcatttctgcacaaactcttccagaaatttgaaaaggaaaacacatttcccaatttcttgtatgagtccggcatttttctgataccaaaaccgataaaagacattacaaaaaaaataaactggagtggaatttaggtcactcttataataaagtgtgagaatgcaaatatggaggattcatctgaaaaaaaatacgacagggtttacaagggatcatttgatcagccaaatctcggttcaaaattctttctctgccactttaccagctgtgtgatcttgggcaagtgattttacctctctctctctcgatttccttatctataaaattgatgtaataaccttggactgagagttagggtgaagattaaattagataatatatttgcagtgcccttaaatagtgcctgggacataatgggtaatccaataactattaactgtaacaagataatattctcgttaagataaaaaaggcttttgccttttgtggtgtgaatacttgtttgtactcagttatttttcgatcaatgaagcaattttaaaattatttttctttgcatttaaaggaagaattatcctttataactacatatgaggcttacctcttaagaagcagtggccttttttctctctctctctcttttttctgtcataggaagaagcaggatttttctgctccaatccagcataaaaattccctttggccatctgttttttggcttgaggacctgacttgcccatatagcagtcactcagtacaagctgagatagagtcccaggaagtcttgttcactgctatctactgtagatttctccaagcccctgtggcttacagccttacttaaggtaaagctctacttaaggtaaagctttacatggctgcaactagagccttgccctccccatggcctggaagacattataaaaatcaagaaatggccctgagtactgatccttgtttatgcttcgcactcaagttaccaatacaccaaagtacaaatcacagcaaagcattcagaactggtttggagccctcactttcaggccctttaagttcaggcttcagtaatcagtgaaaggcaatctcccctcactcctcctgtcctcagcaggagcgtcctgcttattatttttgctgcatgggtaggcaataggatgggagaaggaagacttgctgtgtgcgagggcagacaagaccagaggaagcccttgtgtttgaagctttggaagcacaaagacagaccctgcctgtttattaatgtgctgcaataatagtcccaaatctcctatggagaggatcaagtaaattggtagggaaagagactaaacttattgcaatgttttttcctgctctttggccctaagtcaggatttcttaacagaagcgttagtgttgatttggaccagataattctcttttgtagtcagggcggtggtctgtgcattgtaagatgaatgtttagctgtatctctggtctctacctgctagaagccagcatcaatccccttcccaagttgccaccaccaaaacaccttcaagcatagccaaatatccctggggaggtgggggaagcccttggggattgaaaaccactgacctatgcagatcatgggggtaaagatatttctcactggagccactctatcttttactttgaaaaaaaggagaggacagtaaatccctacagctcacacagcaaagcagtgggagatgagaggggagaaatgggtttgtaaatgaggcttgggtacacaattatctcttctgaatgattagatattgtccaagtaggaaataaagcaccaacttatctagctgaaaagtaaagatttgttttacaggggcctctggtaagagctgagttggagaacaaagatgatggaacaatatttccaaacatcctataaacctcctccccacaaatgaaggaggaccaggaaagcaacacagccctggcagacacaaggcgggtaggacgataaggaagtgcccacagatgtatatcagtgctaaaggtactgctcgcacctctggtaagtaggaccttgtatggtcaaagggcagcacctcattccttgccagcaaaagtaggaaggggctctgttaaaaaaataaaataaaataaaataaaataaaataaaataaaaaaacaagttggagaaaggagacagagacagagtcccttcctcctcaatagtagtcatcagggatttgtgaaggaacaaaagcaggagctgaaacctagcaaattcatgcctgaaagggtgaaaatatacaactgtggtgtgctgaacaaggccctcccagagatgcctatgtcctaatgcccagaacctgtgaatatgttactttaaaagccaaacgagactttgcagatgtgataaagttaagaatccccagatggggagattatcctggattaccctgtgtgcctgatgtaatcacaggctgcttttttttttttttctttttgagattgagtttcactcttcttgcccaggctggagtgcaatgacatgatcttggctcagtgcaacctccgcctcctgggttcaagcgattctcctgcctcagccttccgagtagctgggattacaggtgcatgccaccacacctggctaattttttgtatctttagtagagacagggttttgccatgttggccagactggtctcgaactcctgacctcaagcgatccacccacctcggcctcccgaagtgctgggattacagtcatagacttcttaagagagggatgcgggaaaagtcagttagacagaaggcagtgtaacaacagaaggagagggggaaagggaatgatctgaagatcctgtgttgctggctttgaagatggagaaagggcgtcgtgagaaaaaagatggtggcagcctctggaaatgggaatgggcaagggactagaatcccccccagaatcctcagggggaacgcagcctcacagacccattttagacctctgacctgcacttctctaagctaatacatttgtgttgttataagccagtaagtttgttacaatgtgttacagaagccataggaaacaagcagggggccctacagagtcttgccattcagggttagacacccagcttttagaccaggttgatcaccacgtagctggggccctcccatcatttctgaatcacattttcctagtctgtaaattagccaatcactaggtacctcctgctctgaccaatatattctgctctttcattgctcagaaaacacctagtcggattgctggggtgacagaaaaaaacaagcgctatatatagtgtcagcctctgcctttatggtatgattttttttttttaaatctgatatttgtccctggttcctgacacagagctccttcaaatgccttaggaatttcttacgtgttaggagtatattttgttattcaaaatgagtctctttttactaaacctgagtttatcctaaagaggtgactcatggtggaccctaattagttttgaaggagaagttggccatgccagaaagactaagtgcatgattagaggattggaattttccgccccaacctgtggctaggggtggggaggtggagatgattgagttcagtcatgtggcccatggttgaatcaatcatgcctatataatgaaagctcaacaaaaactctgggcaatgaggctctgagagctttctggttggtaagtgtactgatgtgctggcagggaggtgtgttctgactctttttttttttttttttgagacagagtcttcctctgtcatccacactggagtatagtggcacaatgttggctcacttcaacctccacctcccaggttcaagcaattctcctgcctcagcctcccaagtagctagaattacaggtgccaattccaattacaggtggaattaccaccatgccaagttaactttttctgtttttagtagagacggggtttcaccactttggccaggctggtctcaaactcccgacctcaagtgatccgcccactttggcctcccaaagtgctgggattacaggcgccagccaccatgcctggccgcatcgtcactctctaacctctcgatgggttcttcctgcccactgcacaggcaaacccaattcactgagaccgcagcatcacaataaataaagcatttagctaacatgaggccggtcatcccccagggggatggagttattacaaatcaagctccctgaaaattcagagactgggatttttcaaggatagttctggcaggaacggggccaggaagtgaggagtgctgattggttgggtcagggataaaatcatacatagtcaaagcggtcttcttgtgctgagttggttactgggtagaggccacaggactggttggcaggtctggtagagtccttggttatcagaaatgcaaaaacctgaaaagacatctcaaaaggccaatcttagggtcaacaatagtgatcttatctgcaggagtaactagggaattgaaaatcgtatgacctccagaataatggctggtaatcatttatgtctatatctcagcagaattcaggctcttctcaacctcctcacttggtcatctttcattagctttacaaagatgatttattttggggaaagcgctattatcattttaactatagactcaatgtctcccaaacttagcttgatccaagcccaggaattattaaaggcagttgcgaggttaaaggcaacatgaaggttgattaggtcagatctcttttactgtcataattttctcaccattataatttttgcaaaggcagtttcaactccacagcacagaaacacctttatcaggagccttccaaaccttgccaccctatatattacttcacccggtttgtattcttgataataaaagagcaattgtaagtatagcacgttctgagttctaccagctattctagtgtggggaccataagctcttggcccctaaaggttcactgaaaaatcactgacatgagacagattgattaacaggagaaaaggcatacagatgtgcttaatgtgtatacacaggagccttcagaatgaagacctaacccaacaataagttacagaagcttgagattacagaaagagtgtggacttagagcatggccaaaaacaggcttagtggcaagacaggtttacgggaggaagagaggaagaggcttggctagcaaaggtggccttgttatgtggaggaggcctccctccaagagaatagatagtaaaaatttcttttttgacttttttttcaagttaaagttttttatttttccttttctttctttctctctctctctctctctctcttttttttttttttgagacagagtcttactgtgtttttcaggctggtcttgtactcctggcctccagttatcctcccacctcagcctcccaaagtattaggattacaggtgtcagccaccatgcccagctcttttaagacattttttttccttaagacagagtcttgctctgtttcccaggctggagtgcagtggcgtgatctaggctcactgcaacctctgcctcctgggttcaggcgattctcctgcttcagcctcctgagtagctgggattacaggcatgtgccaccatgcctgactaatttttgggggtttgttttgtttgtttgtttgtttttagtagagacagggtttcaccatgttggccagggtggtctcaaactcctgaccttgtgatcagcctttctagtcttttaaaggtgtcagactcagtctctcctacatcttggaaaggtatagaaaagacctggctacattaatggagattctctacagatgcaaatttacccccacctcaatctgctagctctgagaaagccatttcaaaatatgtcagagaaatatatttcagggtaaaatattttaatttgcttcagtagcaaattgtgaacctgaaagggggtcatgggaatccccaaatttatggccgcattggccaagcagaagtgtagatggcccctggggcttgcggcagcatctgaagtgcaggcaggtttgtggtgctgagccccctaacgtgtgaagttggacattaatttcaggtaattagtgtcagaaatgaaatgaattcttgggcacccggttggtattgggttgtgacccttagctggttgtgtggccttggggacatctccatggagcccagcttttctcgtctaagtgagtagattagtggcattcatgatttttagcagtagaagcctttgttatatcttaatattaatgttaataatatcttacccctaaacctgatatatataataaatgatagcaaatttcaggccgtgaatccctttcaagccttccttctccttcctctgagttacctttgtgaagacctagggccctattagcgattggaaagccactgacccaggtgatatgagatcccctctcctctcagaaaattatcttctgtgttcccaaaatctaatagagatcagatttccccaaagccctgaaggtctctttagagacccctcactccctcaagcagctacaaggggaaccagcgatttagtcagcatgcctgttagctcagttggaaaggagccctcacgcttgcaaaagttcccagcccgggatccaaggtcaaacgtgtggtcgcacagcccagctctttactatcagaaataaaataaattcccactcctctctcttctcccacacaaggcagcaggatgctcaagccctatctctggtaatatcaggtttataagaacactttctcacttttattcatttgagaattgaattagctttcacatttgccttcacagcttcaaagaacatctcccagccatcatttaccacgctattaaattgaggagcatcttgtcggtacatctgataatttgcttctgagtgatgtttgtgttgttgctaagcattttagccagcaacaatgatgttacgaatgtgtagctgggccttttaactaccaactcaaaagagatttcgacaactggatggaacacggtaatgaagagactagattactttaaaagttattatgtttcaatagggcaaactggattcaatataagatacttccagctctggcccaagtaacatctttagtttctcacatgaaactaggtaaaatctgacgtggaggcaactggaaattgtcaagtcccagcatattaagtaggtttaggattgttaccatgaacttctccatttagttcaaccttataggcaagacctgccaggagtgatagaatagagggtgaacgcctaggggttagacccgaaagactgagggttcaaattccagctctgctacttgggcaaattccatattcctcagtttctgctcctggaaaatcaggaaatgtacttcccctcctactgctgacacgtttcatgacccatttctcctctctcatctcctgcataaaatgatttttcagtgaacctttagggaaccaagaacttacggcccccacactagaataactggcagaactcagaaagtaccatacttataattactgtcttattataaaggatacaaatgaacaactggatgaagtgataggtagaggggcaaggtttgcaagggtcctgataaaggtgtttctgtgctgtggagttgaaactgcctttgcaaaaattataatggtgagaaagttatggcaatgaaagagatctgacctaaccaaccttcatgttgcctttaacctcccaactgcctttaataattcctgggcttggaccaagctaagcttgggagacattgagtctatagttaaaatgataatagccctttcccccaaaataaatcatctttgtaaagctaatgaaagaccaccaggtgaggaggttgagaagagcctgaattctactaaggtaaacattatagtaagaatagggttgtggaagggattatcttagatttctcaaccttggcacttttgacatttggggctggaccattatttgttgttgggggctgtcctgtgtattatgggatgtttactggaatccttggcctctaccctccccacctagataccagcagcaaaccccttccaggatgacaatcaaaatagtgtctagacattgtcaaatatttcctagggggcaaaatcagccctgattgagaactactagtttagaaaatgtttccaaagctcttagatggtgcctggtgcaccataagggctcagtagctggtaactgttaagatttttttgttttgttttgagacagagtcttgctctgtcgcccaggctggagtgcagtggcgtgatctcggctcacagcaagctccacctcccgggttcgcgccattctcctgcctcagcctcccgagtagctgggactacaggcgcccgccaccgcacccggctaattgttttgtatttttaatagagacggggtttcactggggtctcgatctcctgacctcgtgatcctctcgcctcggcttcccaaagtgctgggattataggcgtgagccaccacgcccagccaagatttttttaaatgcctgtgaagagcctgcgctactctctgtattactgggttgagtgtgctgttcttgagcttctgctatccttggtggaccaggagactctgtgacccagctctggagaacgtcaaaggagatgtgaattctggtggcctttgtgggacctgacagcctgagctctctgttcttcagactcacaatgcgaaagtcattgtagccactatttgctgagaggaggatccctccgtggacaagtgaggttggcccacacaatgtgtctttcatcagtccatttatttaacaaacatttaccaagtgtctgttatataccaggttctgtgctgggcatctgtaatatgaagaataagccctggtgtctgctttctagatgttacagggtaactgggagcttacctgtaagcaaagatgcttacgacccggaactactacagaaaagaaaagaatttggtcattagatacaacctggaatgtcagagaaagagtcctcgataaggcctcagttttgacaatttaggacctggtgtttcccttccaaaactggttgcgaggatctagctcatattcaggctcttcacttttcaaatgaaaaaagctcaaggacaaagaagagataactctgttcaaggaagacccataaatttataccagatttgaggtttcctaataccgtacgtctccatttgcaggcccgtcaatacaatacaaaagtgaccttggtcagctaaatgttttattctgcaggagaaaagcaagtgttttctcaatatctagtagagattctggcctctgtatgtgtgtgtgtgcacgcacgtgcaattgcacatatatgtgcatgtgtgtatgtgtgtcactattgagagattgggatgatctgtctgcaatttgtctgtgcattgctgaatatttcaaggagaatagatctctgagcaggaggaatcattagtgtgaagtggtctgcaagctcctgcccactattaagtgggactgagcacctctccggccaaggcgttgatggaagactatgagtggatgtgtctgtgctttagagatgtgtcagcggccaggcacggtggctcacacctgtaatcccaacactttgggaggctgaggtgggtggattacctgaggtcagtagttcaagaccagcctggctaacatggtgaaactgcgtttctactaaaaatacaaaaaattaaccaggcatggtggcatgtgcctataattccagctactcaggaggctgaggcaggagaatcgcttgaacccaggaggtggaggttgcagtgagccgagcttgcgccattgcgctccagcctgggcaacaaaagcaaaactccatctcaaaaaaaaagaaaaagaaaaagaaaaaagaaatgtgtcagcagtaggaggggagaactttgattcacactaaactcagaaaacggcaggaagtacttcagtaagtatttgaatgaatgaatgaataaggaggagaagaataagtgagtaaaattcaagaccagagagtcctcctgtgaccacccccaggagagaggtgtagcattcacccattgttttgtctctccaacctggctctttttctggaaattcctcctccacctgcaaatctgtttggttttcttttgagggaccattttctcaagtagtctacatctctagccaatgtcaattggtccatgagtaggtatctgacccagaatgggtcaccacgctgcactggaaacagctgactggcccaagaatgggcacctgacccaagctaagccaacaagtccctccatcaggacttctgggctaagcatcaagggagtaaactcaatatccctctgaggactgacatcataaatagaaaactcagaagctactgagatcagaagagacacttttttttcttctgtatagccaaagaccatttgtaatgagagagatttttttttaaaaaaagaaagaaacagacaattgctacaagaaatggaaaagaatgccagtatgtctgagtctgtggttttatagttcctgagccccacctgcattcctgcccttttttggtttggtcattccattcttgcatgagattcctccatgcccttacaattctctttttccttagctattttaatttgcctgtcgcttgcaatctgaagagtcctggctaaacaaacagacccggagtcagggcaagttaatttcttttgcatgatttgtcacttctttaggcgatattaggcaggcaaacaccacaatattataaatcataaacacaaggcccttggtctgtaataaagcaccattctccttcaaatgcattcactatacctccagaagagaaatagatcagaagttgcttcataacaaagatgccaatattatagaagctcaagatggggaatttactggagagaggagcagtctattgacctgctacaaatgttccggctgtgctgttattcaaatatttctattgcctggagtcctgcatttttttctgtatcctataaacatccatcataagcaaatgggagagcctttccactaaaccttccccacatgcaccattttgaattaatgctacatcgtggacatggctgttcatggtgcagttttttgtagcagcaaatagcttaagctggtgattaatctacatagtttagataccttcattcaaagggagaacaccagtccttattcactgctgatatggttaggctttgtgtcctcacccaaatctcatcttaaattgtaatccccaggtgtttagggaaagacttgatggaacgtgattggatcacaggggcagtttcccctatgctattctcatgatagtgggtgagttcccttgagatctgatggttttataaggcagttttccctgctcttgctcacactctctcctgcctccatgtgaagaacgtccttgcttctccatcaccttccaccatgattgtaagtttcctgtggcctccccagccatgtggaactatgagtgaatttaaacctcttttcttataaatttcccagcctagggtatttatagcagtgtgaaaacggatgaatacaatggccaaccactcttctaggcactgtccaagtattgtttgttacttgattatcacaaacacatagggagatagtggcattgccgttttgtaaaggaggaaactgaggctcagagttgttagggaaattatctagctggtcagtggttgggaaaggattggaagtcagattagactggctacacagcccgtattcttttcttgttgagtttcttcagggacacagagaccaactaggagaatttcttgacttcctagagtttaaaggagtcctgattgatttacccaggttctccttactgaagcacaggcacctgcaggcaggcagggatccatgcacaatatgcagggcctggaatgatgcacagctctttccactctcttcccaacatggggaccttgtgcccagaaagtaaacgcttttgtaaaatgggagaaaatgttcaaagccttcttgtccctaactctggtcactggctgcctctctgcattgctgctcatgtcacatttctctttccaactcaggtggcgttaaagccttggaaacattttgccagcttctctcttcatccacgtttctgttttatatttcacagcgaaaaggagatctgaaaaaaatgcaaatctggatgatgcttctactttgcttaaaacccttctctctgtgggttatttcgactcttagcggaaagtctagaatcctgaatagggcttacgaggcactccaccatcctcctgggcttctcttgctcatctgtcactgtttcactttgctcttgaccctcccctatccagttctcttttcctagttcccgtacctccctccctcactcttccagcccaccccctccccgctgggaggtatgctaacttatagctgcttccctctgagaagtgttttctgaagcctgagatcaggggaggcacctgctccagcccgtggaaccttctgcttcttccttactgatacgacattagtaactgtttttcactgtctgccttagttactaaactaagaatgacagggacaaggctgtgtccccaaaaggcagtctctgcacttgtcagggagtataatcaccaggttatcttgctgtagggaatctttggtgtttgttgtttcacttttattctcaccactctcaattatttcatataatgcagtttattcccgggtctttccaccctggtttattttgtgctgggtgtaacacactcgacttcttaaaacactgcttggaacttgaagcatccttgctctgaaatttttgttggctttgcattgcttaccccagctacaacaaaatgatattcaaagctcttcaaatgtgctcgcaacttaggcctccagctttcataaccaggttctttttgtgagtcctcgtctaatgagaaacattggttttcccttctttggcttcaattccttttctttcctccttctttctctcccttcttcccctttttgcctttcttccctgcatctcctcctttctcatctcaccccctcactctctccatccctcccttatattcattcaacaaagcttccaaccatggatgcctgcttctgagattaccaaccctagctgcacaagagatgtacttaggaagttttctgctttgtttgtttttcctttggacgcctgggcttcaatctcccctctccatctttctcagagattcctatttatttgatagagggtcagaccatgcagcagaatgtttttaaagttctcttgtgattctacagtgcagctggagttgagagcctcaggcctacgtttatcaggctttggactgatttctttcctcatggactttatagtatacattatacagcagtggccgggtgcagtggctcataccctgtaatctcagcactttgggagaccaaggtggatggatcacatgaagtgagagttcaagaccagcctggccaacatcgtgaaaccacttctctgctaaaaatacaaaagatcagcctagcatggtggtggatgcctgtaatcccaggaggctgaggcaggagaatcacttgaacctgagaggcagaggttacagtgagctgagatcttgccactgcactccagcctgggtgacagagcgagactctgtctcaaagaaagaaaaaaattatacagcagtagttttcaaggtgggagaagcaatgttactcacctacccagggagatgtttgggaaacatccagaggcatttttgcttgtcactgctgggggagggtgtgctactagcatctaggggatagaagcgagggctgatgctacacatcctacaatgtgcaggagagtcccccccgtgcaccccacattccccccatacaaaacaaaaaaaaatgacgtggtccaaaatgtcaatagagtcaaggttaagaaacattgttgtagaggaaagcatcataatgaaataatcacacaaatatttattcactgactgaaataaaagcaataaagaaaaatacagtgtgacagtatgcgtgcttcacaaggaaatttgaacttccctaggtgaaatcgccttccctatgggggtatctgcaagaagggcaccaacaaatcacactgcaaagggaccagggatgggaggagcatttctggcagtctccatggtgaatctgaagctttgcagaatttgtagaacttagagaagagcagatgggctggcgtgacaaagaagggaggatgctggaaaataattttaatcttgatcatcagagcaatgggaaactcactgagaagcagggggggcataattctcaccaaatttgcatttgccaaatatccctctggttgacaagtggaaattggattggcatagagcaagcgtggatgtcccagaagtttgagagagacattagactgggctggcagtgagaaagctggggagaaatagatgcaagagatatttaggggtaagtttgatcatctctatgcatacctcatacttgtcagcctctaaatgtttggtgacaccattcttttttttttttttttttttttttttgagacagattctcactcattcacctaggctggagtacagtggtgtgatctcagctcactgcaacttccgcctcctgggttcaagcaattctcctgcctcagccttctgagtagctgggattacaggcacgtgccaccatgcccgcctcatttttctatttttagtagagacggggtttcaccatgtttgtcaggctgggcttgaactcctgaccttgtgatccacccacctcggcttcccagagtgctgggattacagatgtgagccactgcccctggcctgatgacaccattctgtgactggaactattctccctatttcaaaccctcaccattctgtaatcaccacacaaagttaataccaccagaaacttccctggtgaccagccagtatcacagcctttgaaatcctggggttctatatccccttgaaacaagctctttcttgtgatgtataatttacatatattggctttatcttccctacaaaatggtaaagggcttgaccactgaaatctatcttactcatttttattcccctccctccccctcacatacacatagcactttggacacatttttctaaatatttagtctgtttggtgacaaaaaccagaaacctgctcagagtaacttaaaacacgggtttctttgaagtggggctgggacatggtagatgttcctgctctttgcctgccagcattcgttctctgctaacagcatccagctgtcccctttgaacagtgttcctttgctttctcttagtctgcatggctgggtggggcctcactcactccccactgagttctaagggtggattgaccggaggaccatagtgtcttggttcataggtagatagatgatccaaaccatccagtgagcctcagcctcccagtttttctaaacctgcttggaacgtggggtgttttctccattgctgttacaaagccagaacttctgggagttttggtgagcccccaacttggagaatgaagccaattcagaggaaagcgggcagaagagatagaggagaaccgtgaggacatggtctgggcacctgcagccatttgtgcctggtctttgcagctctgtcagccattcaactcccttgggacttaactagtttgagttatgtggatttttctggcacttggaaccagaagcaacccaacaaatactgtaggcagccttcagaattcaggggcaggaatttcagccacatctcccaggagcctggaattgggaattc

SEQ ID NO: 670 - DNA, 220 bp, Homo sapiens
agtgagcagctgactacttgctaagctctgacctggatgaaaagtcaaatcattcctttccctcttcctcccaaacctgtgtttctttccactagaatccctgcccagagtccagcgcttccttcctgtcgaggatcaccttctggtggatcacagggtaaggccaggccccccagacctcagggaggtggtggggagtgaatgaatgaatgaatgaacg

SEQ ID NO: 671 - DNA, 295 bp, Homo sapiens
cgtcctccccctcctcctgtcattgactctcattgcctaacccccttgtgtcttggccccaggttgattgtccggggctaccgccagcccctggagggcagtgacctctggtccttaaacaaggaggacacgtcggaacaagtcgtgcctgttttggtaaagaactggaagaaggaatgcgccaagactaggaagtaagtgtgagtttccttgtcctccaggatgccctggtcacctcctttccactcctgtggcctcaatccaggatggggccctggcagtgctgcctgttact

SEQ ID NO: 672 - DNA, 2228 bp, Homo sapiens
gtgcagcggtgcaatcatagctcactgtagccttgaactcctgggccaaatgagcctcccacctcggcctcccaaagcactgagattacatgcgtgagtcactacttctggcctgtaaataccctttcaaaaatataatatttgattaacatctgccatcttaccataagaaacacttaaaaaaatcccaatccaaaaaaattccaatcctttaagctatataagagtagcaattttatcttgttcctagcaagacatctggcatatagtaaatgctcaataaatatttgttgacagtataaaggtcaagcaacagcataactggcattattacatgaaagtaattatcccttagaaactcattcacccttgggggacccgggccaataaaaaaatcacagaaaacaatcctatctaccttcctccttcctccttccctcgctaggtcctttgattggggggaggtctcaaatgcacacactgtttctgttttatttggtgcagctgttgtgtgcatgtgttatggaaccacatcaggcaggagattaaggaggagaggagaaaagaaaggcatcgctggtatcacagtgaaatttacactctgcggcctcgcctagctcctctgtctctacctgtctgcctatgaaacagttcaaaactaatatggcgcaatggatggtattatagacttcccacctccctggccagacttcttgggttcaaagtttggcttaatcacttaccatctaaataatccctgacaatgtactctgtctttctgggccttagtggctcatctgcaaaatggggataatactacttcttacctcatggggttgtgaggattgcacaagttaatttgtgtaaattgctaagaacacagccttaggaagccttgtcactgtgaatgcatattaattttttttattattattttttgagacagagtcttgctctgttgcccaggctggagtgcagtggtgtgatctaagctcatttcaacctccgctccaggtcagtgattctcctgtttcagcttctcaagtagctgggactacaggtgcccgccaccatgcccggctaatttttgtgtttttagtagagacagggttttgctatgttggctaggctggtcttgaactcctgaccttatgtgatcggcccgcctcggcttcccaaagtgcttgattacaagcacgagccaccatgcctggcctacgattatcatgtctccaggcttcagtttccttacctctgaggtgaggatcaataacctggttatttctaagtgatgcttaaagaggttgagaagaagcaaaggcgctctgcacacaggtgaggtcaacagctgttagtgatggagactggcgccgtctgggtcatcagtgctccggaatcaggctgctcacgggtttgaatctcacttccactttcactccttattaactgtgtgacctcgggcaagtcacttggcctttctgaacctcagtttccccatctgtaaaaggtaggtgaataacagtattcacctccttctgtgtgactcagctttggagtcagcggaccggtcaaatcccagccctgcaagtgattagccaggtgaccctgggcagagggaatcactcaacctctctgcacctgggtttcttccttcatgaacgtggagactttacaggatgaaatgagggcacagttaaggcgcccggtacactccaggcaggtaggctccgttcacgttattttcccctggtgacggatactgtccttaaacagcatttgaaaagtggtcgcagggtgtgtggccccaaagatcccaggcgcttccggaaggcgagccaacgctccccaggcccgtccgcgagcggtgggcctaagccttggaggatctggggtgggggtgacgcggggtccaggcccgggttccgagaggtggctggtccggctgcccacgccgagacgcgcgaggtgagcgggcgccggggcgggcggggtggggcggggccgccgcatccccgtgacgcgcgggccaaccaggcggcgttgcggccccggccccggctccctgcgccgccgccgccgccgccgccagcgctagcgccagcagccgggcccgatcacccgccgcccggtgcccgccgccgcccgcgccagcaaccgggcccgatcacccgccgcccggtgcccgccgccgcccgcgccaccggcatggcgctccggggcttctgcag

SEQ ID NO: 673 - DNA, 98472 bp, Homo sapiens
gagttgagagaagaaggctacagatgatcaaacttctctgagctaaagacggaagttcgaacccatggcaaagaagttaaaaacctagaaaaaagaatagatgaatggctaactagaataaccgatgcagagaagtccttaaaggacctgatggagctgaaaaccatggcacaagaactatgtgacgaaagcacaagcttcagtagccaattcgatcaagtggaagaaagggtatcagtgattgaagatcaaatgaatgaaatgaaacaagaagaggagtttagagaaaaaagaataaaaagaaacaagcaaagcctccaagaaatatgggactatgtgaaaagaccaaatctatgtgtgattggtgtacctgaaagtgacaggattaatggaaccaagttggaaaacactctgcaggatattatccaggagaacttccccaatctagcaaggcaggccaacattcaaattcaggaaatacagagaacaccacaaagatactcctcgagaacagcaactccaagaaacataattgtcagattcgccaaagttgaaatgaaggaaaaaatgttaagagcatgcagagagaaaggtcaggttacccacaaagggaagcccatcagactaacagctgatctctcggcagaaactctacaagccagaagagagagggggccaatattcaacattcttaaagaaaagaattttcaacccagaatttcacatccagccaaactaagcttcataagcgaaggagaaataaaatactttacagacaagcaaatgctgagagattttgttaccaccaggcctgccctaaaagaggtcctgaaggaagcactaaacgtggaaaggaacagccagtaccagtcactgcaaaaacataccaaattgtaaagaccatcaaggctaggaagaaactgcatcaactaatgagcaaaataaccagctaaaatcataatgacaggatcaaatccacacataactatattaaccttaaatttaaatgggctaaatgctccaattaaaagacacagactggcaaactggataaagagtcaagacccatcagtgtgctgtattcaggaaacccatctcacgtgcagagacacacataggctcaaaagaaagggatggaggaagatctaccaagcaaatggaaaacaaaaaaaggcagggattgcaatcctagtctctgataaaacagaatttaaaccaacaaagatcaaaagagacaaagaaggccattacataatggtaaacggatcaattcaacaagaagaactaactatcctaaatatatatattcacccaatacaggagcaccaagattcataaagcaagtccttagatacctacaaagagactcccacacaataataatgggagactttaagaccccactatcagcattagacagatcaacgagacagaagttaacaaggatatccaggaattgaactcagctctgcaccaagtggacctaatagacatctacagaactctccaccccaaatcaacagaatatacattcttctcagcaccacactgcacttactccaaaattgaccacgtagttggaagtaaagcactcctcagcaaatgtaaaagaacagaaattataacaaactgtgtctcagaccacagtgcaatcaaactagaactcaggattaagaaactcactcaaaaccgctcaactacatggaaactgaacaacctgctcctgaacgactactgggcacataacgaaatgaaggcagaaataaagatgttctttgaaaccaatgagaacaaagacacaacataccagaatctctgggacacatttaaagcagtgggtagagggaaattaatagcactaaatgcccacaagagaaagcaggaaaggtgtaaaattgacaccctaacatcacaattaaaagaactagagaagcatgagcaaacacattcaaaagctagcagaaggcaagaaataactaagatcagagcagaactgaaggagatagagacataaaaaacccttcaaaaagtcaatgaatccaggagctggttttttgaaaagatcaacaaaattgattgactgctagcaagaccaataaagaagaaaagagagaagaatcaaatagacgcaataaaaaatgataaaggggatatcaccactgatatcacagaaatacaaactaccatcagagaatactgtaaacacccctacataaataaactagaaaatctagaagaaatggataaattcctcaacacatacaccctcccaagactaaaccaggaagaagttgaatctctgaatagaccaataacgggctctgaaattaatagcttaccaaccaaaaaaagtccaggaccagacagaatcacagccgaattctaccagaggtacaaggaggaactggtaccattccttctgaaactattccaatcaatagaaaaagagggaatcctccctaactcattttatgaggccagcatcatcctgataccaaagcctggcagagtcacaacaaaaaaagagaattttagaccaatatccctgacgaacatcaatgcaaaaatcctcaataaaatactggcaaaccgtgggcgcggtggctcacgcctataatcgcagcactttgggaggctgaggcgggcggatcacaaggtcaagagatcaagaccatcctggctaacatggtgaaaccctgtctctactaaaaatacaaaaactagccaggcgtggtggtggggacctgtagtctcagctactcgagaggctgaggcaggagaatggcgtgaacccgggaggcgcagcttgcagtgagcccagatagcgccactacagtccggcctgggcgaaacagcgcaactccgtctcaaaaaataaataaataaaataaaataaaataaaataaaataaaataaaatactggcaaaccgaatccagcagcacatcaaaaagcttatccaccatgatcaagtgggcttcacccctgggatgcaaggctggttcaacatacacaaatcaataaacgtaatacagcatataaacagaaccaaagaaaaaaaccacattattatctcaatagatgcagaaaaggcctttgacaaaattcaacagccattcatgctaaaaactctcaataaattaggtattgatgggaggtatctaaacataataagagctatttatgacaaacccatagccaatatcatactgaatgggaaaaactggaagcattccctttgaaaattggcacaagacaggatgccctctctcaccactcctattcaacatagtgttggaagttctggccagggcaatcaggcagaagaaagaaagaaagggtattcaattaggaaaagaggaagtaaaactgtccctgtttgcagatgacatgactgtatatctagaaaaccccattgtctcagcccaaagcctccttaagctgataagcaacttcagcaaagtctcaggatacaaaatcaatgtgcaaaaatcacaagcattcttatacatcaataacagacagagagccaaatcatgagtgaactcccattcacaattgcttcaaagagaataaaatacctaggaatccaacttacaagggatgtgaaggacctcttcaaggagaactacaaaccactgctcaacgaaataaaagaggacacaaacaaatggaagaacattccatgctcatggataggaagaatcaatatcgtgaaaatggccatactgcccaaggtaatttatagattcaatgccatccccatcaagctaccaatgactttcttcatagaattggaaaaaactactttaaagttaatatggaaccaaaaaagagcctgcattggcaagtcaatcctaagctaaaagaacaaagctggaggcatcatgctacctgacttcaaactatactacaaggctacagtaaccaaaacagcatggtactggtaccaaaacagagatatagaccaatggaacagaacagagccctcagaaataataccatacatctacaactatctgatctttgacaaacctgacaaaaacaagaaatgggaaaaggattccctatttaacaaatggtgctgggaaaactggctagccatatgtagaaagctgaaactggatcccttccttacaccttatacaaacattaattcaagatggattaaagacttacatgttagacctaaaaccataaaaaccctagaagaaaacctaggcaataccattcaggacataggcatggtcaaggagttcatgtctaaaacaccaaaagcaaaggcaacaaaagccaaaattgacaaaaatgggatctaattaaactaaagagcttctgcacagcaaaagaaactatcattagagtgaactggcaacctacagaatgggagaaaatttttgcaatctactcatctgacaaagggctagtatccagaatctacaaagaactcaaacaaatttacaagaaaaaaacaaccccaccaacaagtgggtgaaggatatgaacagacactcctcaaaagaagacatttatgcagccaatagacacatgaaaaaatgctcatgatcactggccatcagagaaatgcaaatcaaaaccacaatgagataccatctcacaccagttagaatggcaatcattaaaaagtcaggaaacaacaggtgctggagaggatgtggagaaataggaacacttttacactattggtgggactgtaaactagttcaaccattgtggaagacagtgtggtgattcctcaaggatctagaactagaaatatcatttgacccagccatcccattactaggtatatacccaaaggaatataaatcatgctgctatacagacacatgcacaagtatgtttattgcagcactattcacaatagcaaagacttggaaccaacccaaatgtccaacaatgatagactggattaagaaaatgtggcacatatacaccatggaatactatgcagccataaaaaatgatgagttcatgtcctttgtagggacatggatgaagctggaaaccatcctcagcaaactatcgcaaggacaaaaaaccaaacacctcatgttctcactcacaggtgggaactgaacaatgagaacacttggacacaggaaggggaacatcacacaccggggcctattgtggggtggggggatgggggagggatagcattaggagatatacctaatgtaaatgacaagttaatgggtgcagcacaccaacatggcacatgtatacatatgtaacaaacctgcacgttatgcacatgtaccctagaacttaaagtataatttaaacaaatttaaaaaaataaagaaaaaaaaacttctaaaaaaataaataaaaccagctttcatttgataaacaatttattctccaaagtgctaatttttttttaaattgcccttactgaggctttttaaacaaataaaaaaagaggagagaagacaatgaataggggcttttggttacatgagaagtatgcagcagtgtttgagagtgtggatgttttggtgtctttttatccatttaattactaagttggatttcagctgacatgacacttaattctaacttctttgctaccaaataatggctgtcacagtttgaaacacgtcatatttaccaaaaatgggcaaatgctttcttgagctgcctctgtaagacatatttcaaatgaaaaccagatgaggagacttcttccaaaaatattgtcttgtcttgtaccaacagaaaagcaccgaaaactgttttaagcataatcagaattcctaatagttaccccctatttagccaattttttggaaaccaaatgtgaatgtagattccttaaattaaaatttatgtacttaacaattactttcttgaaatgcaagcttattttaagctaaatttggggtgggggtctgtgaagcaaatgcagaaatgcattttcttgaaattgttgagtttgcattgtgctactaacacaattcccattttcactttccttgcacaccagttagctctgtccggtgtcatcgccagcctgtctctactttttaaaaaatcatccatcttaagaatgtgggtcattgactataataagccaaacttatacagcacaggtgcagcaaggacaatttattgctgtctgcagacagttttttgttgtcgttgtttttgagacagggtcttgctctgccacccaggctggagtgcagtggtgtgatcataactcactgcagcctcagactcctaagaccctcctgcctcagcctcccaagtagctgggactacaggttcatgccatgacatatgctattttttaagatttttatttttattattttgtagagatgagatctcactatgttgtccaggctggtctcaaactcttgtgctcaagcaaccctcccacctcagtctcccaaagtgctgggattacaagtatgagtcagctcgcctagctagacaatcttaaagtatttgctttaaaggtaattgattcaatacctcaaatttgaataaaaggtaggattattcacatttaacatttcacagcttaccaatgttaatactccaatcattttcactgtcttcgtttttttccttttttgtttgctgtaaaaaatagaattgcttcaatttaaaactgttacaaaatgttttacaatcaattgaacataaatatgtttagttacaatattcaactattatattttcaaatataagagtgatgttcacaaaatgtcaaaattattcagttcaacaaacatagcaagcacaaaagtaactgtcgaaggtactacaaagatacatggatacataagaaatggtcgcctgccttacagagctcacatacacaggaaagataagtatgctaacagtgtcgctaagtcaattaagttatttgttttctaaaattaaaaaaaatcatgatttaaaattaggaatgtctattcttctgaaggattgtggagagtggtgtcaggcaatcttgttggtgatacattcaaagtacatctagaatttaaccacttatcaccagtttcattgctgtcaccagtagggcagcctcctgcctagtctctccacttccacctatgccgcttcagtctatcttcaactagcagtcagagtaattatttcaaaatgccaagccatacactacttctttgctcaaaaacctacaatggctttcctttttcttacaataaaagccaaaatccttgcattaacctctgaggtcctacacgatctgtttgcttatttcctctctgaccacatccctactcccaaacctgcttactctgctccaaccagcctggactctctgctgttccatgaactcaccaaacatgtacctgactcagggtctttgcattgccagttaccttttccgggaatgctctccccttagatacccacacagctgtctcctctcatttctttcaagtctttgctcaaatattacctttaaaataagatctaccctaaccaccctacttaaaattacaaagtactccccttttgtactcctgatccccttaacctggattaatgcttttttccatggcgttaattaccttctaacattggctgtggtttacttatttagtatgtacattatttatgtctgtcctccgtactataatataaactctatgagggagtgtgtgtgtgtgtgtgtgtatgatgatttatatatatatgatgatttttacataaatatgatgcatttatccaggtaaatgataaagttttactcataagatgattccaaattatgtaaagtattgactaaaatcactggacaaacatctgccactaaatatgttcaaaagaatgtgccatgggcaatagcaacataattagaacaagaatataactaatttgattgaagcaggcttaacttcctttaaatatattatctttggtctgcttttataaaaattagtttcactacatttgatttcataatcatgtggtcttaacttattgttaactttctgtatttctcttttgagctgctttcttctttccagcagaagctgtgggcttcccctctgaggactttcctgggttctgaagtgttactacaccttttgtaggaatagctcctttgcacacgcatcaaatgttaagccagtgcaatacataaatagacttcttcatgaaaatgccatctattaatagactcacagtcaatccctgcctaaacagccagctgatgaaaaccatatttttctattgcgtgtgtaagtacttccattggaagtaacaccatctatcactttttcaattctacatggcaaaactaaattttctatgaaaaaatacaatggtgcttagaagaaatacagcaaggttactgcacaaccacattaacaggctaaaataatgcttcagtttaagcatcaggtaggcatgttttcagttagctaatcaagcccctagcagcttgaggacaaactacagagactgataaatttgtccctctgggtgatcacttgacacaggtcaattttttctgggtagcctggtatgaactcagagaccgtaatagcctcataaactatttcaggctaaaggcgaaaatgattcactattcccacagtgaaagaggaaacaaagacacacgccattgactgggaacttctgccccgctcataaagcctgtgaagtgagtttaacaagggccaggggaaccgagaaagacatgaaggcaaaggaagcgctgcttccccctaccacttgaacaaaactgattcggatgtacagaagttccccctccccacctatcctcccagaaaggagaaatacaaataagcctggcgatgagaggagggggaggggtaagacaaggaggaagagacataacaggggatgggcaggaggggagggagtttttgcttcactgcccttgttcaaaaagcacagccatcaacagcagatgtctgacaccctttaagtctgaacaatcagatgatgtatatgaaagtcatttgtaaaagtttcaagagttacgtaatacaatgaatgttatacaatgcagatattcattgaatcccccctgcacaaagggaagggagcacttttcaagacagccttttcttcctgaatctgttccaaaaggagcctcagtgacattctttgaggccacacaacacgtttgctccaaggtcagaaccggatgcaagacccttcaaagaagcctccaaaacaaaggtcttcaaaggcatcaaccgatttttacaacttctttccaagggtgaacttagtcctgctgattggcgtgtaacggaaaagccagtggctgctggggatgtacctgctgatgcccagttcaaagtcgccctccgcgctcgtggggcgccaggctgttccgttctttgccgcctcaagatccatctcagcctgaggagaaaccacagcctcagaaccaagtacaccctctccggcggcccggcgcacgagtcgcggggcccgggggcactgggtggaggtccggccactcccgccccgcgccccacgtcccgggtctcccttcgaggccagacgcgcccggacctctctcacctcgaacctcgcgcgtgtctggcagggcctctggacgcgcgggcgctgcagcagaggggcctggactttgctcgccgcggcctcgcccccgcccccgcccccgccccccacgcgcgtccggcccgggaaacgcctaccgttgcagccagggcgagggccgcggcccgcgagagcagctcccgccgcccgcccagctctctccccaggctaggcgcgggccaggggcgcagcctgccgctcttgccgccggggcgcccggctggggccgccgcccaccctggcgacccgccagaaccagcccggtcgcaggataagaccgagatcaggctggagcctcgggtgccgagaaagcctcgcctgatgggccacccaagcccctgcagatgactgtcacaccccatgggcgctcagttttgtttttaaacccataggggagacagtttccggacgcccaacaatcacagggcggcccaggaccgagagagagcaatagactcgcctcttgcttccgcatccccagttctggtccaggtggcactgaacccaattatctccaaggacggcgagagtcagccagggccggcaggaaccatcacattatgctccttggggaggaggaacgctgttggtgccctcttagcacttaagagacacagagttttagggctagaggggtcttcagcgatcatctaattaaaaccccgtatgtttaacatatgaagaaacggatgcccagagaggtgaagtcctgcctgaggctgcatcggtggaaccagagtctaggggaagcctcctgagtcccagtccagtgccctggctcactgctctcatctaagacttctgtctgtattgaattgtctctgctcctaccacctatttgagtatgactttcttctttctgattaattcctccacactcttcccaaaaggaagtgtctaaaacggggagccataagtttcatggctttgaaaccggagactttcaaactcagagcttcacatcttattaactatgtgactttggacactgtgctcatttctctaggcctgtttccttatatgtaaaatgaggataaaaacatctcccttatcaggttattgcgaggaataaatgagttgaggataagggaattaagtactaggtaaaagcacctagtactatgcctaaaacatagtaggtgagcaacaaatacaactttccttccttctgatcaggtagcaggatgaccagtgggtccttgcacctgctatgtcctgttaacacaattgttagcccaaggcttgtctgagttctcagagaaccttaaagcagagcatggtataagtagagatgctgggtggaccctggtgtgaatctcacctttcccatgtaccagctgtctggccaggttatgtaattcttgactcagtcattggatctataaaataagggtgttattaggattagggatactgtgtgtaaagtgtcctgcacgtaggagacacctaataaatggtgactattattatagtaaaagttcaggcgaggccaaggaagaaagactggaacaggagccagcagcttcggcactcaccccttacttgtgctgtgcctctgcatcctgctctgcctgccacctggagctaaggtggaacttgacttgaaactgcatgctggagtagaaatgaatttagttgagtatttttcctcaaaatgttttctctccatatcagtctaccatgaccatgaggattctcttcttaaatcaacccaaattccttcccttcactggtctaacaggcggtcagatcattatttcaagatactctgagacggaagcagttggaattgtgtagtttgaaagaaggcttgtggtgactggaggacattattaaactcattagcacataaggagatgacagtttcttcagtctctaataaaagagaatttgataaagtaaatgcagatacttgaaggagtaggaaggttcagaacaaaaactaaagcaaataacatgtatgaggcaatgaggtgtatttgcctgtctgtctgtctgagccgattcacaaagttgtccctgcaagaagccatgcctatatggctgtgtttacttctttacctgtattacatccaattccaggagctccttttatatttatttgataacagtgcagtatcactgagaattccatcatttattcatcaactagaagttgaagacttacaatatttaaagcactatgataaactagatttctccattacactcaggctgtaagaaatctttactttccctttacagtagaatattgagatacttatgcattgatgtaaggctggaattaatgccctaccacgctatcttactttttctatttgccccattggttccatctttcttttttatcctcacttttgccttattttagatctgtttaatattatcatttagatttcctttctataagatgtattcttttattttctatttaataatgatctcctttctagggattatgacatgtatctttgactaatcattgtactttttcctcttccaggacaatgcaatgattttagaactcttaagtctcttttttattcacccctaacttttacattgccattgtcatgtactttaattttctctgtatattcatgactcttctgggaatattatttctttatgagttgatacttatttagctttatcaaaacatttatcattttcttgctttttgtttcttcctacatctcaaagctaccctcttggatcattttcctttcacctaatgagcactctttcatctactgtctctttcttgttttctttagtttgtgacaaattttctcagcttttttttcctgaaaatttatttcacttttatcttgaaaaattatcagttatttatgggtttgccttactaaataaatatcaaaactcattatcaaactatggtaattagagacatgtgttttggaatgagacagacaaagtaaaacagaatcaatatcttataactgatggaactagaattcgaatccagggagtatccttatccgctatgactagcagggaagtggagatggagaacatacgtcagatgtatcagagagttaaacacagtcattctttaatgcatccttcagtccactgatcttaccacctttttactgttcctcacctccttcatgtcttctctcttaactcagcctgaaaacacccacaaccctctagccctctctctttatcaggcttgcttagtaaaaccacaatcctggataattcaagttactgagctactgtgaacctacaccatgcagcagaacatgtctgaagaaaaatacaaagtcatcgggcttgcctcgccatgaacttacatggccctatactgtatacataatgtacttattatgtttattatttattgcccactctgtgggatgcaagacttatgagggcaaagattttgtaaaattcactatgtatcccaacgtttactgaccaatagtcataagatgttttcttagttcattcactcacctgcttttctaataattatttcatatcgtctgttttctcaaattctgttcttttacatcttcacattctgctaaattaccgtgcttatttcactgatgaagttgaagtgtttagaatggaactccataacctcctaccatgatatttttccacttaccagcatctgtaccaacactctgcctttgctgtttctgtaaatgaactattcatgcctctctttgcagccagtctttgtttgcatgttcatcctgtagatcccatcccctttcactttcacaaggagccattcttccctttctgtcctatatcatcaatttccccatgcctgctggatccctcctgtgagcttacatacatactgttatttcttccatcttgaaaaacaaacaaaaaacctctcttgaccacacttcccctgccagctaccatcatatttccctcttttcctttggagctaaactggttggcaaagtttattactttcttcaattcctgttgttctctctgaaacccactctaaacagaagtttgatctttccacactaccgaaactatttttataaaagtcactgataatctctgctttgctaagtccaaagatcaattctctgttcttattttacctgacaaattcaataatttgacagatttatcactctgtctttctgaatatatctttttcatatagattccaggacaccatatgtttctcggattttcctatgctttcctgatcactcttcctcagtctcctttgatgccttctctctctctctttttttcaactacttacctaacactggagtggtccaaggctcattccttggacttctcagtctattctcgccacttctgtcatgtcagtcagtcacacagctttaaataccatctgtatcgaataatttctaactttttgtttctagcctaaaattccctcttgcattcctgactcttaaacacaagtgcatctttgacattcctatctggatgtttaacagacatctcaagcttaacatgcctaacctgctcctgatcctttccccaggctgggccctccagtgaacttctgcatccagttggcagctccagacttatagttgtcaacaaaaacactggaatcatcctgcattcctctctttctttgacacaccataatcaatctgtcaggaaatcttgttgcctttactttcaaaatatattcagaatctgacctttgccctgcacctccagctctaccaccatcatgcaagccactatcatctccacctgattttctataatagcttgttaattgtctctctgcctctgtcctttcctcctcttccgcctttgtccattgtcaaaagcatggcctggatgattcttttgaaatgtgagtcacatcacatcactcttctcttcacatttctgtggtagcccccaattcactcagtcatggcctacaatgctgtgccctctccgtgacctctctgatctcatttttatttattttgtctttgcctaactccactccagccacactggcctcttggatattactcagacaagagaggcagcactccacctcagggtgtttgtactagttgttccccctgtccaaaattatcctccccaaaatactgacatggaggacactctcacctcctaaaaatctcttctcaattagaagttggatcttgtaccctcaggactctcagttcctcttatcctactttgattttcttttccacagcatttatcaccttctagtatactatatcattaaagaatttattatgcttattgtctcttgtcatcttagtagcacataagagccgtgagagtaaaaatattaatatgttttcatttcattcgctggaatatccaataattgctgcccacacttactatgtgcaaggacctgggctaaggttttaggataaaaagttttaggcatataaagaaggatttaaacaaggctaatgcaaaagttactcagattatatagtattttatgaatttacagagcctatcacacatatatatcatctcatttgattctcaaaacaaggagcatgttcaaggtaaacaagtgaggaactattattctcagtttagaggtggggatatcaaagtgaattttacacagctagtaaacaatggaattaggcttccagctctggccacgtgacttcagcttctcattctgtattcctattgaagaccactgttagacagaagccttacctgttgtatttctagtgcccacagcaccagtgggctcagtaaatgtgtattgaatagatcaatatttttgaactatagcataaaagggtttgtacaaaaagaatttcctataagtaagagtcaacagagaataacaaattccatctaccaaagtattttcaaattatattcaaatataaattaattagcaacaatttttcctaaagagggtgctatgatggactctattctctgtcctgttgacttatatcttgacaaatatgctctgtggtcttttcccccactatattgcatttgtggctatctaacaattctccaaattttcatgtctgaagatagtgaaaatttgactattctgtttgcacttggctgcacttaactactcttgaatcatttccaaacttttggtcactaatgttttttacttctgctcaaactaccttctcagagtttatagatcttaatttttcctgcctttacttccttcaacccatgttacatcttatacttctcccaaagtttttttttcttttttaaaaaacccttctcattgcttgactcagaaattttttgctttgcctttgacctttctcttaaaaatattatttccttttggtttcgttcttcttttgttcattataaaattcatctaattcggcccagcacacccaaaggcactcataaagatgttgaagacaagggtaatactgattcagctctctctctctctgttttccactaaactcttccttataccttcataaactagggtggacttgcaaaggtaccatgacaagaagtagttagaagaatttgctattaatcactatgttatatcatttctgccaacgtggattaatgggcacattgagagttccaaggtcacattgcctaatgaaattcttgtgttctgtgagagtaatgaaaaccactgggtggacagggagggctgcaaggtgccaaggccaacgatgaaatggataagcaagagtagggtcactaggcttaaggttattgacatttactaactcttaaagttattctaaagctaacgcttttcaaaataaaagaatgactaaaggaagttctctaaatagaaaattataaacaggagaaacttagaatatctagaataaagaacatggtcaagaaaaatattggtaaatacaagaaactttcctcttcctattgagttttctaaattattttttatgggtgaagcaaaaattatatcactgtctgatgtggttctaaatataagtaagggaaatacataagacaattacaagtgaatgagagagagtaaagggatataagggagataagatttctacacttcactcaaacaagtaaaatgatgaaaatagtaaagtatgataagttatttatatataatgcaatactcagaggaccactaaaaaatctacacaaatagatatagtcaagactaccacaggtagagaagaagggcagggcaagatggctgaatagaaggatctactgattgtccctctctacaagaacactaaatttaaacaactatctatacacaaaaagcaactttataaaagccaaaaatcagatgagcactcatagttcctagttttaacttcatatcgctgaaagaggcattgaagagggtaggaaagacagtcttgaattgctgatgccacccttcatcctcccagcagtggccacattgtgcggagagaaaagctatgtgtttgggagagggagagcacagagattgtgagactgtgcattgaactcagtgcttccctgtcacagtataaagcaaagctgggctgaactcagttgacacctgcccacagagggagcatttagatcaggcctagccagaggggaatcacccatcccagttgtcggaacttgagttccatcaagcttcatcactgtgggctaaaatgccttggggctctaaataaacttgaaagtcagtgtaggccacaaggactgcaactcctaggtgatttctagtgctaagctgagctcagagccagtggacttggggaggcacatgacctacggagacaccagctggggcagctaaggaaatggcttgcaccacccttcccccaaccccaggcagcatagctcatggctccaaaagagattccttccttctgcttgaggagaggaaagggaagagtaaagaggactttattttgcatcttggttaccagcttagccacagtaggataggggactggtcagagtcatgagactcacatcccaggccctagctcctggacatttctagacatacgctggacaagaagggaatctactgctttgaagggaaggaaccagtcctagcaggactcattacttgctgacctttgggccccgaataaccatcagtgatgcccagatagtacgccatggacatggaccttgggtaggactctgagatgtgctggctttaggtaagatccagcacattacccgctatggtggcggtggtgagagactctttgcttgagaaaagcaggtggaaaagtaaaggagactttgtattgcaccttaggtaccaattcggccacagggtcaaagcaccaagcaggctcttggaatccaggccttggctcttttatggcatttctggacccgccatgagcagagggtgcccactgccctaaagaatgagttccagaccgggcagcattcaccacaagctgattgaaaaacctttgtgccttaagtgaaccgtggcagtagcctggaagtactcccctgggcctgtggtggtgaaggccagggggcgaggctctcctgcctgtggaaaggggagggaagaatgtgtctagtggtttgagtgccaactaaactgcacaccaagtagatttctaaggattctgactccagtctctggctctcagactacacctctcaacctacccagggcctgggggaactcaccaccctgaagggaaggatacaaacgtggctagatttactaccagctgattatagagccccaaggtcttgagcacacattggtagccaggtagtggttacatcaggccttgagcaagatgcagtactgtgctgatttcaggtctgtcctagtgcagccccagtggtgtagccacagaggaacttgtgtcatcccaccccaagctccaggatgtccagcacagaaaaagagagagggagagagagagagagagaatttgtttgtttgggagaaagtaaaagaagacaacaagagtctctgcctggtaagaaattttctggatcttatccaagaccatcaaggcagtacctctataagtctgtaagaaaccacaatgttactgggcttagggtgctccctaatgcagatacagcttagatcaaaatacccaagtactttcaaacacctagaaaagccttctcaagaaagatgggtacaaacaagctcgggctgcaaagaccaaaataaatacctaacacttcaatgcccatatactgaccgatacctacaagtatcaataccatccaggaaaacatgacctcaccaaatgaactaaataagtcacctgggaacaatactgaagaaagagatatgtgacctgtcaggcagagaattcaaaatagctgttttgacatatagaccaatgaaacagaacagagacctcagaaataatatcgcacatctacaaccatctgatctttgacaaacctgacaacaacaagcaatgggggaaaggatctcctattcaataaatggtgctgggaaaactggctagccatatgcagaaaactgaaagtggactccttccttacaacttatacaaaagttaactcaagatggattaaagacttaaaacccaaaaccataaaacactagaagaaaacctaggcaataccattcaggacataggaatgggcaaagacttcatgatgaaaatgccaaaaggaattgcaacaaaagccaaaactgaccaatgggatctaattaaactaaagagctctgcacagcaaaagaaactatcatcagagttaacaggcaacctatagaatctgacaaaggtcaaatatccagaatctacaaggaacttaaacaaatttacaagaaaaaaacaaataaccccataaaaaagttggcaaaggatatgaagagacacttctccaaagaagacatttatgcagccaacaaacatataaaaagaagctcaacatcactgatcattagagaaatgcaaatcaaaaccacaatgagacaccatctcatgccagtctgaatagtgatcattaaaaagtcaagagacagtagatgctagtgaggctgtggagaaataggaacacttttacaccgttggtgagaatgtaagttagttcaatcattgtggaagacagtgtggtgattcctcaaagatctagaaccagaaataccatttgacccagcaatcccattactaggtatacacccaaaggaatataaatcattctactataaagacacgtgcacacgtatgtttattgcagcactatttacaatagcaaagacatggaaccaacccaaatgcccatcaataatagactggataaagaaaatgtggaacatatgcaccatggaatactatgcaaccataaaaagggatgagatcatgtcctttgcagggacatggatgaagctggaagccatcattctcagcaaactaacataggaacagaaaactaaacactgcatattctcactcataagttggagttgaacaatgagaacacatggacacaggaaggggaacaacacacactagagccaattgggggtggaggggcaagaagagggagtgtattaggacaaatagctaatgcatgcaaggcttaaaacctagaatgatggattgataggtgcagcaaaccaccatggcatacgtacacctgtgtaacaaacctacacattctgtacttatctcccagaacttaaagtaaaaaataaataaataaaatagctattttgagaaaactcaaagaaagtcaagataacacagagaaggaattcagatttctatcggataaagttaacaaagagattgaaataatttaaaacagtcaagcagaaattctggagttgaaaaatgcaattgacttactgaaaatgcatcgaggtcttttaatggcagaattgatcaagcagaagaaagaattagtgagttatttgaaaatacacagtgaatacacaaaactacacacacaaaaagaatttaaaaaatgaaacacaactataagatctagaaaatagcatcaaaagggcaaatctaatagttattggccttaaaaagtaggtagagagagtgatggggtagaaagtttattcaaaggaatcgtaagagggatttcatcaacactggatctgtcccacaagaaatgctgacgggagtactacaatcagaaagaaagggatgttaatgagcagtaagatcatctgaagctacaaaactcatggtaataataagcacatagaacacagactattttaacaatgtaactgtggtgtgtaaactactcttatcttaagtagaaagactaaaaggtgaaccaatcttttttcaagacataggcagcacaataacgtataaatagaaacaataaaaaatttaaaagcagagaatgagtttaaggtgtaaaggttttttcagttttctttttgcttgtttgtttgtgcaaacagtgttaagttgttatcagcttaaaataatcagttataagatagtatttacaagccccagagtaacctcaaatcaacaaacctacaacagttacacaaaagatataaagcaagaaattaaaacataccttcagagaaactaccttcactaaaaggaagacaggaaagaaaatagagaagatcacaaaacaaccagaaaacaaataataaaatggcaggagtaagtctttacttatcaataataacattgaatataaatggcctagactctccaatcaaaagtcatagagtcactgaatggattaaaacaaaacaaaacaacacaaaacaagaccgaatgatctgttgcccacaagaaacacacttaatccataaagatacacatagactgaaaattaagggatagaaaaagatattccatgccaatggaaacaaaaaaaaaaaaagaggaggagtagctatacatgtatcagacaaaatagatttcaagacgaaaactgtaagaagaaacaaggttactatataatgataaaggggttgattcagcaagaggatataacaattttaaatatatatgcacccaacactggagcatccagatatataaagcacatatctttagaactgaagagagagatagatcctaatacaataatacttgaagacttcaacttcccactttcagcattgaacagaacttccagacagaaaattaacaaagaaacattggacttaatctgcactatagaccaaatggacctgatagatagttacagaacatttcatccaacaagtgcagaatacacattcttcttctcagcacatggatcattcaaggatagaccatatgttagatcacaaaataagtcttaaaacattcaaaaacattgaaataatattaagcatcttctctgaccatgatggaataaaactagaaatcaataacaacaggaattttggaaactgtgcaaacacatagaaattaaacaatatgctcttgaaagactaatggatcaatgaagaaattaagaagaaaattgaaaaatttattaaacaaatgaaaatggaaacacaacacaccaaaacctatggaatacagcaaaagtagtactaagagggaagtttgaagctgtaagtacccatatcaaaaaaaggaaaaacttcaaataagtaacctaatggtgcatcttaaagaactagagaaacaagagcacaccaaaccaaaaattagtagaagaaaagagataataaagatgagagcaaaaataaatgaaacagagatgaagaaaacaatgaaaaaagatcaatgaaagacaaaaattagttttttgaaaaaataaacaaaattgacaaacatttagccagactaagaaaaaagaagatccaagcaaacaaaatcagagatgaaaagggcaatattacaactataccatagaaattcaaaggatcattgctggctactaggagcaactacatgacaataaattggaaaatctaaaaaaaaaaaaaaaaatagataagttcctagacagaacctaccaagactgaaccgtaaagaaatccaaaacctgaacagaccaataataagtaacaagatcaaagccataataaaaagtctctcagcaaagaaaatcttgggacccaatggcttcactgctcaattctgccaagcatttaaagaataactaataccaattctatttaaactatcctgaaaaataaggaggagggaatacttccatactcattctacaaggccagtattatcctgctaccaaaacaaaagacacataaaaaagaaaaaactacaagccaatatcactgatgagtattgatgaaaaaaatcctcaacaaaatactagcaaacttattttaacaacacattaaaaagatcattcatcatgatcaagtggtatttttcccagggaagaaagatggttcaacatacacaaatcaatcaatgtgatacatcatatcaacagaatgaagaaaagctatatgatcattttgattgatacagaaaaagcatttgacaaattccaacatcccttcatgacaaaaaccatcaaaacactgagtatagaagaaacatacctcaacacacacaaaaaagccatatgtgacagatgcatggctagtatcatagtgaatagtgaaaaactgaaaatctttcctctaagatgtggaacaagacaaggatgcccactttcaccactgttattcgacataggactgtaagtcctagctagagcaatcagacaaggaaaagaaaggacatccaaattggaaaggaagaagtaaaattatccttgtttgcagatggtatgattttatatttgggaacacctaaagagtccatcaaaaaactattcaaactgataaataaattcagtaaagttgcagcatacaaaatcaacatacaaaaatcagtaacacttctatatgccaactgcaaacaatctgaaaaagaaatcaagaaagcaatcccatttacgatagctacaaataaaatcaaacacctgaaaagtaacttaagaagggtaagatctctaaaataagtgttataaatcatcaatgcaagaaattgaaaaggacaccaaaaaatgaaaagataccccatgtttatggattggaagaatcaatgttattaaaatgtccatactatctaaagtgatctacagatttaatgcagtctctatcaaaacaccagtgaaattctttgcagaaaaaaaaaatcctaaaattcatatggaaacacaagacctagaatagccaaagctatcctgagcaaaaagaacaaaactggaggaatcacattacctgacttcaaattatgctacagagctaaagtaaccaaagcaacatggtactgtcataaaagctggccccatacagcactggaacagaataaagaaccccaaaataaatccatacatctacaggaaactcattttcagcaaagatgccaagaatatacactggagaaaggacagtcttttcaataaatggtctgggaaaactggatatccatatgcagaagaatgaataaaggcctctatctctcaccttatgcaaaaatcaaatcaaagtggactaaagacttaaatctaagaaatgaaactaagaaactgccaaaagaaagcattggggaaactgtccaggacactggactgggcaaagattttttttagtaatattccataagcacagtcaaccaaagcaaaaatgtataaatgggatcacatcacattaaaaagcttctccagagcataggaaacaatctaaaaagtgatgagacacccacagaatggtagaaaatatctgcaaactatccatctgacaagggattaataaccagaatatataagaagttcaaacaaacctatagaaaaaaaaactcataatccgatttaaaaatgggcaaaagatctgaatagacatttctcaaaagaaggcacacaaatggcaaagagacatatgagcatcattgatcatcagagaaaagcaaataaaaactacaatgtgatatcatcttaccccagttaaaatgacttttatccagatgacaggtaataatgaatgctggtgaggatgtggagaaaagggaactcttgtatgctgttggtgggaattagtacacccactatggaaaacagtatggaggtgtctctgaaaactaaaattagaactaatatatgatccagcaatcccactcctaggaatatacccaaaagaaaggaaatcagtatatcaaagagatatttgcactttcaagtttactgcagcacaattcacaatagcgaagatttggcagcaacctaagtgtccatcagcagatgaatggataaagaaattgtggtacatatacaaaatggagtactattcaatcataaaaaatgagattctgtcatttgtaaacaacatggatggaactagaggttgttatattgaatgaaataagccaggcacagaaagacaaacttcgcatgttctcacatatttgaggaagctaaaaaatgtaacaattgaactcatggaggtaggaagcagaaggatgactaccagaggctatgaagggtagtggaagacagtgttacgggaaactggggaagttaatggatatataaagagagttagaaagaataaataaaacctagtatttgatagcacaatagggtgattatagtcaaaataatttaattgtacattttaaaataacaaaagagtataattttattgtaacacaaaagataaatgcttgagggaatggattccccattcaccctgatgggattattacatattgcatgtctgtatcaaaaaataataaatttatacccccactgtgtacacacaaaattaaaaaataaaaaaagaacaccacagataaatcaaaatggatttttttacactgcttcagcagtgaaagaagtgtactgcctcatttccacagatcggggtagaagttcaggtttctcgcatgatctccaatgacacttggggttgagggaggtggtccttgttattgctgggcagaagtgacagttctgattccccactggccctctactgatgtctttctggctggaaggagtagaagtgcactgttagtccccccacgtggcctctatggtgttggggagatgatcctgttaccattaggtagtgtggtaagtcctaagtctccactaggcttcctcttccattaccccagagggaagtgggtggggtgcctcattactacaaggtgggaatgaaacatctgttctctacttggccttgtctgacactaccctggggtgggggtagacagagagtgaggttgacatgcctggcaagggaggaagtcaagtctccctactttgcttttgctggagtgagtctgggtggtgtcacagttttttctacaatgtttggctagagtagagtgactgctgtttcaacgtgttctctcttgctaggctgtccctttctgagtccttttactaggaagggcaggacatttttgtctgtgtacattggcatttttggatttttgccttcttttgctccaagtctgagatataggaggcaaacaaacaaaccagaaactcaccaccatgtgtcattcctcagatcccaggatccttagctagtctgtcttattctctccacatttccattgtcttatgtttgttttatttataatgttcagtgtttttaattgtacttagtaggacaaataggaaaaagtatgtctactccattttcccagaagttgctgcctaattttttaaatccacatttctctaatagggtacagaggcaaaggatgaatattctaaaatcaaattagccaatctttgcgtttgttcatcaatagaagaagggctgcaaagtattagataacaagatttatctaagtcatctgctcattttcctccttctcactctcttaccctctcagtaacatcctgtctatttcatctacttacacaaatctgtgtatttttctagataagacatgaaggtgggtggacattgtctcagtccggcctcatgcttactccacagtaaaacatgaaatcagatgccaataattatagacctcgccatagcaggacaataggcaatgttaaaaaatgagaggatgtgctcttcatttgtgtagccataatttatatactaactacactaattgcattaattatatgatgttacattatattatactacattcgttatacctattttgcatctttactcttctatttgacaatgagctccttcagggaagaggatgaaccaaatcggttatctggaacattgcaagcccctgataaatgctcttctttctcttcttgcccactcccttttccaccaccagctagttcaggaattaaggcagaaagaccaggggagaaacatccacaactaatctaggcttgaaggcttgaagaagacctctgaatgaataaccaggtaggtctccatcagtccctcaagctggatcttgcaggaggtgctggccacctttcacctgaccccatacatctttggagatcctgatttatgcagacaccaatgattggaaggaagggttgcggtaccctgtcttccacttccctcttttagagttctggccaattttgtcaatatttattcatttgtacaataaatacttatggaggaagagcaggatggagtgaaaagcatacccacaggcaaggttttccaaactgtgacgtgaggaatgccaacaggtgcttagtgataacgagtgttccatgatgaagtaagtttgagaaatgctgcttaccacactcagaagatcacaatgcacatcacagatcctgagaagctctatagttaaaaaaaagtcttttaactttgtttccagtgtttccccctttcctgacactgcaaaatactcgctgaaagcacaatattaataatttctttaaacttattcataaagctactcctaagaaaaataatcctaacaattccaagagcagggaaacaatgccaaagacagatgcaggtgaagaatggagacatggaataaagaaggtgtgatgttaatttgactgagtcaaaaagtagataaggatatggtggaatataaaagagatttgatacagtagaggctaagaactaggaggaatttagactttcagagtttattgagaggattttgagaaagcaatgattatactggtcaagaatggtggattcttttgccataatttgaattgtcatgtatcagtcaaggtctcagcatgaaacaaatggcatattcaaattaggatattcaaggaggatgtaatgaaggaactatttagaaaggtaggagtagaacatagggcatagtggatataccataatagatagcaaaatatcttggggccacaaacactggggaggtgtatggccttccctaggccagcatggatgagggaaaggagcagttcccagaagccatattgagcatcatgtagatagaactgcttcaagaagagcagtgatccaccccaactgtctccaggcacccccttcagctgaacccacagaagtcaacttcctaaagtaaacagcagtgtggaggggagggtggagaatagatatggaatggcaaaaggaagatatctggcacatgtctgaagctgaagaatctggaaactgccagcaggtattttaactctaccatttcctgactagctatgtctgttcatgattcatgcaacacttttatttgttttgtccttccttcttcctctacttttactttaggatccaggggtacatgtgcagatttcctacatgggtaaattgtgtgttgctgaggcttggtgtacaaatgatcctgtcatctagctagtgagcatagtacacaataggtagtcttccaaagcacacatgcccccacctttccctctcaagtaggccccagtgtctattgttcccatctttgtgttcatgtatattcaatgcttagctacaaattataagtgagaatatgcagtatttggttttctgttcctgcgttagtttgcttaggataagggcttccacctgcatccatgttgctgcaaaggacatgacttcattttttatggctgcatagtattccatagtatatatttaccaaatttttgttatccaatccaacattgatgggcatctccattgattccatttctttgctatagtgactagtgctttatgcaacactttgaaagacagcacccattgtgtcaagacattgtgttgagacagtgaagacacaaagatagtaagatagagactagcccttaggtatgtaaaatagctataaacagagtgaaaataggaaataattaaaatatagagtgaaacataaagaaatacagaaagcataagggagttcagtgcagagaattttcatagctaacttatgactttagccttgatgggcaatgcaataaaattgttggctaaggtagcctttctagcataaatgcaaatatcaagaattttaaaagaagtatttaaatctaatttcagctatcaatgaatgaatttaatttcattactataacaaaaaataatccataatcaaaattttagctactcaaaaaagttgctttctgaagtaaagtatatgataaacacaaattcataaatgctaatttttttgtgaaacaccagcattttgtgtttagtctctgacacttttaaacagtcctaaaaatatttgttctcgtaaaggaaatccttagtattgttttaaataaactttaacctatttcctttttggcatatttctctccaggctttgtctatatgcatatgttcttgacctggactctctgaatccaaagaactttataccattctttaattaaaagaggtagaatattgtggtcatggggtttttcaaataattcgggaaatctcagccatattttggctagacctggcactatcccaaaataacatggaaaatcattgataagtcctgcatgagtcatctgtttaaactgaagaattgggataacggtgtcattgcccatgctgatcgagacgttttgcacaagagagagttgacaagggacaatgaactctttcggaaattaaaaaataatttgtactaaaatcttgatgaaaatagaaagcctcaactgcaaactggcttgaatatataactaaaatattatatttatgacttagataatattgtttagttttgtctttctattcttgatttaaaataatatatatataatatatatatatttacacacacaaacatacatatatattccttccctcaccttgcctttccccccatccccaaatagaataatgtgattccctgcctatgatattagaatgctgtgtgcaccaacccccatgcttgtggttgaaattctacagatacaaaagctctcttgcagtctacccacacattcaggagtcacaaggcaggtgtctgaagttggtccttttttccctttacttatggaatttgtaaagtgttatattttcatctttataatggaaaaagtaaaatgtgatttattttacaaaatttcaccgcacaggtacatttgaaagaataaggccactctaaagtgaggcatatctcaacactcatattatttcaaaagaatcacaacaaaaataaaaataataaaagctattctggcacacaatatccttcaggctcaggtcctgcctggccctgccccattccttggggcctctacccacccttcctcacacccaacatctaaaactctgaccgcactgaatcacttctggttccagccttctaaactgttctatactgctctccacatccacactcctcctctattgtccatctgacatgcatctattccattatccaggaagctttttatttaatagactttcttttttcgagcattttttagattcacagcaaaattgagtggaaggtagagagacttcccatgtacctcctatttctacacattgattgccttcccaccagagtggcacatttattgcaatgattcctctacactgacacatcatcacccaaagtccaaatagtttattttagggttcactcttggtattgtacattcagtgggtttgggcaaatgcataatgatatgtgtctaccactgtagtatcttatagagtagttttactgccctaaaaaattatctgtgcttcatccctcactcccccaatctctagcaaccactgatctttttactatctccatagtcttgccttttccagaatgtgatgtagttggaattatacagtttgaaccttttcagattgggttctttcacttagtaatatgcatttaattttcctctgtggcttttcatggctcatttctctttagcattgcgtgatatttcattgtcttgatgtaacacagtttttcatctatttaccttccaaaggacatcttcgttgccctggaatattttttagcccttaaaccactctccagagaggtaactgctcttttcttggtccccactaccacaccccaccatcttgcatcatggcatcaatgcacattactaaacttatgtcctgtctcctaagctgtaagctccttgtctaatcattgtgctcccaatatctaggccagtaggcacttaaaataattgctacatggataaatacaaaaattccttttcatgcaagagaagtggtagctttgaagagcaagaaaaatatgaaatgaaggcaatcagcttttttttttgcttatatcttaagtattgggtattgtcttaaatacttcattacagtatttagtgctcaactaattcaatgaggtagacattgaaattccattttttccaatgcagaaataggggcttaaaaaaagtaagtaacttgcccaagaagccacacattttagcaaactggcagccagaacagaagcccaggtttctctgactggagagcctaggagcttggctatacaccaagcataatcatactcttacacagcgtcttgtgtagagaaggaaatcatttaaatttagccacccagttgagaaagcgaaaactgggtttcaactcaaaggtcacttttccttttgacccaaactgactcttttgaaagagcccaggtaaaaatatttcatcatatatctttgcccttgcacatatctgtaagcattcctgcttttctctttgctattctgatttctccaaactgcaagggcagaggtctttcatctcagtgtcggaagttccagctgggacaaaggactacagttgcaggaagtgctccctgaaaatcttgtgtttaatctttgttttttcccaagagcaacaaatctcttattttttttcatttaacaaatatttttattgaagacttttgatatgccaagtattgatagaggtattgatgtatacaatgataaaccaggtgcccaccatgatattgcagctaagagggatttttttgaagatcaagagagttaaggtcactgaaagtccttgataggctctggaactaggagggttattacttgttctggttatgaattggcttaaaacaaatggtttttatgatatcttctagttgtatagattgactgggctctgctgagggttctcatctcatgaggttgcggtcagatgcttattgggtccatcttgggggctggcacttgatgctggcagtgggctaggtcaggttacatagtcaccccatgtaacatgggcttttcatagaatagtgactggattctgacagtgcaggatcatcacagttcaggatctggtccttggcttaaaataccctgaaacctattttgtcaagcaggggtctcagagggagaccctggagatggtgggcacaggacaggagcagcagaaccttcaccaggaggatcccccctggtcctgtgacccatgcgtccagctcggggccctcaggtgggggctgcaaagaagctggttgtcccttgaaagctggagcaagtgagcaggtacacttggacctgaggctgtggtttttccccaggctgaagtggatcttgaggtggcaaggaatggaacagcctggcgccctgggagagtggagggtgactttgaactgggcatcagcagatgtatgcccagcagccacttgcttttccattacatgtgaatcagcagggccaagttcacccttggaaagaagttgtaaaaatcggttgatgcctttgaaggcctttgttttggaggcttctttgaagggtcttgcatccagttctgaccttggagcaagtgttaagtggcctcgaggaatgtcactgaggctccttttggaacagattcaggaagaaaacgctgtcttgaaaagtgctctcttctctttgtgcaggggagattcaataaatatctctgttgtataacattccttgtattatgtaactcttaaaacttttacaaatgactttcatatacatcatctgattgttcagacttaaagggtgtcagacatctgctgttgatggctgtgctttttgaacaagggtagtgaagtaaaaactccctcccttcctgcccaccccctgttatgtctcttcctccatgtcttacccctccccctcctcccatcgctaggcttgttctttacttcttctttctgggaggtgaggtgagaagggggctcctacatagcatcctgtgtacctgtcacccaactttcttccatgatgacatgtagtgactgtagttcaaaatcaaatccagaacactgaaattggtacaatactgttactgtactactacaactttcatatatatatattttcttttctaaaattaagagcacacaatttgcataagtcttttctcttttattctgtatagtgggtaaggctcagtcctcaggtgttactgtaatgatgggcttccctatttttcatgtacaattacatggctttagataggaatcttctttatatattttatattaacaaaagcctttttagatattaatttgtgataaaatgaaactgacccagaaaaagtacacactttttcacacacacaaaaaaaattggcaaaagaacagacacttattgagcctctgctatatgccaaggactttgccaaacaccggaacacagtgacgcaaagacagtcctctctcaaagggttcacacatcagagcatgagccttaagctgagatataagaaaaacgcatttctaaaaaagacctcttattgagacctggggacaaatggctgcattatgtgtcaggaaagagactgaagcacattttgtcccaacatcaggagttgattctggtgaaccaaacagaagaaccaccattgttaaagttgggtataactggataatctggggtggaactaagaaaataaagaagcctgggctagaaaaggattgaactcaaacaagtcgcacatgctgggatccatctgtgttttgcctatatcttgagggccacacctcaaacatctattactttgatatcatcttcaagccatacaaacaaatcctcctccttctaaagagttcctcatctccctcactgtcacagtatttcccagctggcctctattctccctccctctcttactaggctgtgagtgtttctcatagctacctgttctctgcttttaccagcccaactcagagccacattaccctcgtcgcttgcatgttttctcttaaataaaagcatcttatttagcttcattgatttgaggcatgtattagtttcctgagactactgtgacaaattaccacaagcatggtgggttaaaacaacagaagattctcctctcctagttctggaagccagaaatccaaaatccagcaggactacaattccttcatggactccaggggataatccatttttttgtctcttccagcttttggtggctgctggcatttcttgacatgtggctgcatcactccgatttctgctcccatgatcacatcacctcctcttcttctgtgtcaaaccttcttgtgcctcacttttataaggacactggaccttggatttagggcccaccagaataatccaggatgatctcctcaagatctttatatctgtaaagaccttttctacaagtaaagtcacattcatagtttttgaggattaggatcggagatgcctttttggaggccaccattcaactcactgcagggcttttcctgtccaatccctctgagtgggtatcagtattttcaccacattatgctcctattcagagtcatcaatggtttttcattttctctctcttcaaatctgaattactctgcctggcattctaggcttaccacaatttggccccacctaaatttggtaccccaccaacatcccataatttacttcaccagacatttagtagtgtctactatgcctaagacactgtttctaggcttttggggacaccaagataaatacagtgtcacccagccttcacagagcgtgtggccctgctgaggagacaaatttacacagctgactatgaaacacaacacaacaaacaacacagtcccttcccaccaggcagcctctgcactatgcacactcccgctactctgctgcattcatccattctcacactgctatgaagaccaacacttggtcatttataaagaaaagaggtttaattgactcacaattccacaggctgtacagcaggcgtgggtggggaggcctcaggaagcttataatcatggcagaagggtgaaggggaagcaagaacatcttcccatggtggcaggagagagagagagggaagcaggaagtgctacacacttttaaacaatcagatcttgcgagaactcactcactatcatgagaacttgctgttctgctgccacaatccaatcgcctcccaccatgtccattccccaacgctggggattacaattcaacatgagatttgggtggaggcacaagagccaaaccatatcacatgcttttaactattatccatgatgtgtgacacagtttggtacttaatcacatagtcctacagcttcactactgtaatcaccttttgtgtcactcaagaaaatgtttcttaaacataagaacttctgcttctcttactttttaccagagttattataggagtgttacaaataatggtgtacatgtctttgtgtgagactttgcttgtactaaaatcatttgttgcatctgagatcactggttgaatgtggtaattgaccctgtgaggtaaatttggagaaaataaatggtgtgaaaaagagcaccccctctctgacagcctttaatgctaaaggggcagcaatatactcaagcagaaaaagctggaggccctgggaggggctccacctccatgcaactccagccagggcaaaacagtgaatagggaaacatggttcagagagagccagcgagtgtcaccaactacagcaactagactgtgcaaacgacagtaaaaaatacttttatttttctttttatagacatctaagaatttttatcccagctactcagggggctgaggcaggagaatcgcttgaacccagaggtggaggttgcagtgagctgagatcaccactgcactctagtctagcctggtcaacagagcaagactccgcttcagaaaaaaaaaaaaaaagaaagtgtccttacagcagacatacaaagagttgagggaaaaatctttaagaagtcaaaccaagtgacatggttttatgcttctattcacataaatttatcgaaatttcctaaactaagcacactttttaaagccttaaaattttaaaacaaaagctgaaaacttaggagataaaattgtttctaattctggtttattttggattgtctctcagaagtttaaatatatatatagtatatataattatatatattatatatattatatatataatatatattatatatataattatatataattttatattatataattatatatattatatatataattatatatataaaattatatataattatatatatataaaattatatataattatatatatataaaattatatataattatatatagactgtatctatagttacagatacataaatatagatagataactatagatacataaatatagatttatattatatatataatatttaaaaagccaccatattgttcaagccatttggcaaccattttttctttatacaaattatattttgtaatattcttcaacataattttctaatgattatatggtattccattttgtgaatgcaccaaaacttaatgtataatttcttactgttaaatatttagatctttccaattttcaatattataagtaatgctactaaaagtatccttttacatatctcttaaatccttataattacaattgctgtcttgaaggatatacatttacattttttacttacattatcaaataacaaagaagtttatatcaatgaccaattcaactaataaggaatgtcacattagatttttttattcatcattaaattacaaggcaaaaaaatgatattttgttttaatttgcatttatttgattgttgaaactgtatacatttttctcatgcatttcttctttgagaattacctgattatatcctttcctatttttttttcctggaggtgatggcttcttttttttatttttagaagttgcttatttaagatagcaattgtttatagtaaatatagtttataatgttaataatgctttttggctaatttaaaaaaatttgtcgtccagagtcccaacctttggaatatatttttttctttttttatcatgtttgtatcaagatgtagttaaactcatggcacattttaaacatctgtaagtcagaaggatcacttttggaagaggccaattactggcaaaagtgattcattatcaagacaaaaagtaaatgtactttggaagtgtaaaaatcttaaaaaatccttaaagaaccctttataaaagcaatgcaaagtatttactatacatctgaataatatgcacttcataattgtgcctcaccccacctcctaaaatcttatatcgatctgtgttttgggtttgagagccaccttaatgtggaaatgcaagaatcagcaggatcaagtccaagaagaatgaagccagatggttctgtaagacccaatgtgaatagacatatacaacaggaattatttaaactgcttaaccattcccacaaaaatgagtaggtatatttaaagaaaacttttttaaagcagaagttatctacaatattccaattgagagaagatatattcacaggcagtttggacaagatgactccagtcacatgaaagtttagttttattatagacactttatgcaaacatttcaatactttttgctacttctataatcttttagcaaggcagtcagttacagtccaaatgggaaaatataaacaaaattacacattttatcttttaaaatctactttaattctgttataaaatttataatgcagtttaaactatgatttctctccacttgatgatgtctctcactctgttcctttaattacgaagtctctgaagactctgaacttgactgaggaaatgttaaacagatacctcttcataattctgtaagtgtttgcttttaactttgaataaatgtcatatctaaacaaatattaaaaagtatttaacatctcatacagtcagagttcactggcgctttgttccagcctggacactgaccattgaaaaatagatgcctttctgtgccagcagctgctgatgcgtgccatgctccttgactctgccattctgaaacaccactattaagtctgcattctggatggtggacaggcggtgagcaatcacaatgcaggtgcggccttctctggctttgtccagggcttcttggacaacctattccataatcacatagattaattctcataatagttcttttccctaattcctcttccataaaaagctccacagtaggacgggcatggtggctcacgcctgtaatcccagcactttgggaggccaaggcgggcagatcacaaggtcagattgagaccatcctggctaacacggtgaaaccccatctctatcaaaaatacaaaaaattagctgggcttggtggtgggtgcctgtagtcccagctagtcgggaggctgaggcaggagaatggtgtgaacccgggaggcagagcttgcagggagccaagattgcgccactgcactccagcctgggcgacagagcgagactccatctcaaagaaaaaaaaaaaaaaaagctccacaacaatacaacaatagatccttcttaacaaggtgtcagtgaaatagaacaggtttttgaaaacaaaggatttgtcatatcagatgactgaaccctaatttgggttagttccgaggcagcagttatctatccctaactttttttttttatttgaaacagggcctcactctgtcaccagggtggagtgtagtggtacaatcatggcttactgcagcctcaacctcctgggctcaagcgattcttccacctcagccttctgagtagctgggactacaagttcccaccaccatgcctagctaattattttattttttgtagagacaatgtctctctgtgttacccaggctggtctcaaaaatcctgggctcaagtgatcctcccacctcagccttccaaagtgttggggttacaggtgtgagccacggcagtaggtgccggccagcagtcatctactcttaaagttaaggcagtaaatacagttcactgactcatttaaaaacatttactaatgtgtttaccttagtttcaaggatgttacaacatccttgaaaacagacctcaaatccagctcacagtaaattcaagaagcctgagcaaaggccaaatacagactcccgaatttttttattgtagagaatacctcatactgagttcgtctttcagataatctgaatttttaacgttttctctgactagaaatgattgctaatatttatcttaaaaggtacagccagattttaacactgtcttacactaccacttttccttatggttgctgaagagatgctgccagtagaagtaggaaatatggttcctgaaagcagcttcttaggtcaacgcaaactgatctagtgatggtttgtgaagcatatgtgctctaagactaatctgccttgtgtcatctttactctcctgaataacagctacagaaagtgtttacattttactgaaaggtgatgtaagtaactgtcaataatctggctgcattttgttctttactatggagaatacagcatttttaaggatgactgattcaagtatggatgaacccaatttaaattcttaccttttcactttctgtatccagagctgacgtggcttcatccaaaagcaaaatatgaggctgtctaacaagggcacgagctatggcaatgcgttgtttctggccaccagagagctgagttcctttgtctcctactttagtgctatatttctgtaaataaggttttgttgttatgaaagtagaactgaaagtaaagttctaacagcttgcttatagaaagtaggatagacgattctatatactccaaaaatttaggttcagaagctaagaatggttcatgaataattaaggaaagaacagtaaaaaagcccaaaatggcaggtttactatctatttgaaaataaatgtttgggccttaagatgatatgttttagtgtaaacaggtcagcattttaatgaagaagaatattgttgcaatgttagtatcttccatcttctgatttcattatatttgggacaaagattggcaggagaaaggaaatttgatttgaacaaagtattcataataaaataattgaagctcatcttacttgtaaccagcaggtgacactctctgcatgattttaaattgaggaaagacattcttgggatatcagccttttagtgtctgtttttatgaaagtatctccaacacttaaacaattttaatggatgctatcaaaatggattccattttgatatctaactttgaaaatgaacatctcctttttaaacatttttgttgttagagtgctcccaaaattcttcccgtgttgtttcccacaatggataattgtcaccaactattcactatgatgatagggacagcagttaaaggttactcaggagagagcagaaacaggatgtgactgcacttgtaacctagaaaacaatactatcttattatttccaggctgaaattttagtacagggttgcctatttttatttgctatatctggcaaccctagttttgtggcactcagccctgggtttccccctgtaaatagagggagaagacgccagatgaggttttggcagatgcttgggactggctctaccccagagctgtggctgtctcagaaggcaggagcactgaagtgtatctcatgtgagtggagggtttactagttgcactcttgatatagtactgatcctgttgaggcagataaaggcagtgcggcagtcttacaaggaggtagctaaaccagccacctacagggtgaggtaaatcctagtattaatcacttaggagaagtggatccttaggtaataggacttaggggttttaccttttctctcctggtctagacactgaggaagagaattatggtgtctacaggtgtgttctgtgtgacagattagagaccaggatttgtcctgtggtagacaaatgccagagaggcaaagtatatttaaaaagatagataatagttactctctgtgtttgtgttttattaacccctagcccagtggttccccaatttgagcctgcaacagtattacctgggctcttaaaacgtggattgctggatctgcagtcctaacaggttcccaggtgatgctgatccgtgtctatacttgagaaccactatcctctcatcagtaaaggggattggagctttctgttttaaatgtttgagcctggagaagggtcaattatctagttgggctagactgtgaaaggagagtgggagacaaggccacctccctgggacttaatgagattggtgtcagcagttatccaaagaagagcctatggaagaagggaatcttgggaaagagagccacctggtgttgcttgcctgcctcgtgaggaaactgtcttccccgccgggttgaggctcctgagctttgttttagggggcacttccttagaataaagagcataactggtgataatgggtgaggtagattacctaggttgagaagcacttcaaaatataggacctaacttttgcagcaacatggatgcagctggaggccattatcccaagcaaagtaatgcaggaacagaaagccaaatactgcatgttctcacttataagtggcagctaaacatcaggtactcatagatgaaaagtggcaacaatagaaactgaggactattagtgtagggagggaaggggggtaagtgttgaaaaactacctattgggttctgtgctcagtacctaggtgacaggatcatttgtaccctgaaacctcagcatcatgcaatatacccaggtataataaacctgtacatgtaccccctaagtctaaaataaaggttggaaaaaatctaattttggacttttaatacaggttgagcatccataatccaaaaaattcaaaatctgaaattctgaaactttttgagcaccaacatgatgccacaagtggaaaatttcacacatgatctcatgtgacaggtcacagtcaaaacacagtcaaaactttgtttcatgctcaaagttattaaaaatttgtataaaattgccttctggctatgtgtataaggtatacatgaaatataagtgaattatgtatatgcaaatattccaaaatccaaaacacttctggtcccaagtattttggacaaggaatagtcaacttgtattccaaaacaaaacaaaacacaaaaactaatacacaggacctaagagggcttgagagaggatgagaggttccatttatccaacttcctaggaggaattcagaggacacccataggaccacagcccagggagccctagaaaagatttcaaccattcactgtaaacaaagtttggggcccatgaaatgtatgacgatgagagattacatgataccatggtcactttaatggttcaacccttattcagagagagcactctttctggcatgggttcagccctctggactggactgactccacagtgagttttgaggcttgggagagagctgcaaggaggaagaaggaagagaaataggggagagacatggggagagacagtcatgcctacttcctcagcaggccagaagcagcatgtgcaggtggggacccagactctgtacttggacttaaagtgaaaggctttccagatattgtacttacccctaaggctgacaaaggtggagcctcaagcctatagctttggatcaagacaattgttccagttctcctatcccagaaatgttcctctctcctaaacctgaagtggtcgaacactttcatcccttcctcacaaggagggtcaggtgatcaggtaaaggtaacaactaacccaaacaggaagtgtggccagatgcttgtatacaggtaagggtgtgatttggttgctaatttctcttcacttctgggagaccagccccttataaatcaaactataggccagagaggctgccacatgctcccaggctgtttatttgaagagagacttacattaggcagtgactcgatgaaggcatgtatgttggcctcctttgctgccctcacaatctcttcctgtgacaccacccggctgttgtctccataggcaatgttctcagcaatgctgcagtcaaacaggatgggctcctgggacacgatgcccaggtgtgctcggagccactgaacattcagtcgctttatttctttgccatcaagcagctgaaaacaagagttcacagatcaacttcaggaccagcacactttgaatgtagcacaattaacatcattatttcttacactgaaactgccaagttactgtgagattaaggaaaagtttgtgtgattaaaatttggatagtgaaggttaacccaacaaggtcataattgtatgccttgaggaactgtcatgtttcctgtgtttcaaccatggtttctgatgtatgcatgtggtaggcagaataatgttccctctcccacaagacatctgtgtcctaatccctggatcctgtgaatgtgttatgttacatggcaaaaagaaactaaagtagtagatgtaaggttgctaatcagctgactgtaaaataagattatcctgaattatcttggtgaaactaatgtaatcataagggctcttaactgaagaagaaggagggagaagagtatcagcaaatgcagtgtgagaaagactcaaccagccactgctggttttgaaaatggaggaaggggccacaagcaagaaaacagatcatcctttggagcctctagaaggaacacagccctcctgacacttgatatgagcccactgagacctattttagacttctgacctccagaagtgtaaagtcataaattggtgttgttttaagccactgaatttgtggcaagtggttatagcagccacactaatacaacgcctaatacttctgagatgtatcctgacagccttattcttaaatctccatttttcagagaaacagtgcccaggattagcatggaaataaataacaactatgaccacataatagctttgcaggtcaggaactacaggggatggataggtgaacaggggtaggaaagggtgaatggagatcctcaatactgagccagatgagtaggaacagagggctgccctttctctataatctggctccctggattatcctgcagaagactggggagggcaccttacagccttgctgataacaagccctactctgatgcaaatatgtctatcagataggtctgctttgcaagataattttctggcattcaagtgagagagctgttcatcccttctgaagaaggcaccagtgactcagctttgagcttttctaatagtagtgactagtgcgtgctgagccatatactctctgtatcccatgtgcctggctgggtggctcaaggggacagctgcctagcagtagagtacaatctttgctacaggaacatggcttctgcttgtgacactggcaggtgcagggatggaagctctcccataaccttattagttccaagctgagttgccatggagactattccacacatgtatgctccaggcttccttacaatgttaataaatgaaggtggaaagtagagggtggagagagacagtgaaagccaaacaaggatgtggctaagcagcagatcttgttagataaaacactgtacttgagaagtggaaatttaaggaaaggaggagtttggtttttgcttttgtttttgttgtaattttccaggtttatacccctgggaggaaaacagacactgcctaactaatataatcacaggcaaatctgaatgatctcagcaagttataatgagtttcttcattacactgaatacactcttgggcctcctcgtccccgcataataccctagaattgcaaactatttaaaacctgtgttgactgaagaattctttctttaagtaaaacaagtttagatgcctagaatgtaaaacagatcaaagaagcagagcttctttggctgaggaatggtgttggtctgaggaaagaccaaggaactctggggaatctatgagaagtgctcaaaaaatcctggcctaaataaaaatataactaggaaagtaaacctattggtaagaaataatgaaaggccagattaaaatgattggctatctctattgtagactgttaagtctattgcttgctttcattagcgcaaaaatgtaaatgttaaatgtgtattcttctatgcatatttactgtgaaataataattgatttttaaaaatcaagcactgacaacgttgtaggttctgtgataagcatgtctcatacagtctcttgtttaaccttcatagcaacacttataaggtcactgtgatgttaattcccattttactgataaggaaatgagcaaagttaagtaacttatacaaggtcacacaattagtaattgggggaaaaccaagactggatctaaacactctaggttgggttttggtaacactaatacctcacaactgaaagatattttgtgtccccccttgaaaggggaatgcccccatcttggctcaggcacttcttgggttataaccagacaatgacaagcagcttctaattgtatcccaaagggggttctgactgttgtatatgggagagactggaaaggggagaaaggaaaggtaaggggaagactcaaagcaggggtgatttaacagtgacactgatgaaggttaagcttcaagagccctcaattacatgtaaattctgggaagtcgaacagttttctgggtgggagggaggcaaggctgtagtcaggaagctcttccctgtaagtattgatgataaattacctaaaaatgaaaagggaccagaatctttaagcttccagtatttggttatgatttttttttcatttgaagtaaatatccacctttgtatctaattttgcattaaaaaaaaaattttttttttttactttaagttgaatccctacaattgtataaccttcaggtccctcaaaacttggaggatcctcccatcttcacaatttcatagcttaattattcaagactctccacaatttaacctaaatctttcttcaaatttaccagttcagtggctctcgaatgatggttggcatcagaatcacctcggaatattataaaaataaaaggccaaaccctagcctacttgaataatccaggccggctgtgttttttactagctcttgaggccattctaatattcaccgaagctttagaaccaccatttcaggtcaatgtttttcaacatgggattcaaggtccactgatggtcacgagaatttcctgacttcagggggtccttagggtccaatcctttctttaattcttatgctcaaatccacagactcatttttacatggcaataaaaactaattagtagtaatccactgagttattcagggctactcattgatgtccataaacaaaactttgtacatttactagagtttattgtggacactttctgctgagaagtctggctgcagtgcaccatctggcagtatttccaagccctagtgcaaatgcacaggagaagataatggatattcctgcaataaatgaggacactttgttttcagtgcattatcaataatgtcttgggatgcttactgtcctatgcactcagcattcattttcatatacttctgtgtctgaccttttatacatcaagggactagaaggctaaaaactatttcccagtttcccttggttctggaagtaagtcagggtctacgagggagatgcacagtgtaaaatctgggaggtagacaccagctctccttcagcagctgtggtaagctaacggcttaactcatctttggcagacaagaatttctgcaacagccagattctagtctcgtgtctttaaatttggaacagctgtgatatcggcataattttctgcagcttcttggttacagaatcacagctgcagtgctgtgatttggaagtctgggagcaaatagcctcctttcactcttccagcccttccaaagattttgtaagcatgtaattccctttattaaatacttatctacttgaaatacctagggcagtttctgtttcctactctgaactgtaactgatgctgtccatgttttattatgttctgcttgtgtttatatacttgcagaataatcattaattattccttattgtatcattattgtgctgtattgtattgttgttttcaactccaacattttgttatcaccaagtgtttttcccactggaaagtgactatgagtacattagtggatggtgacatctttaaatctttcctacatgagttctcatcagagaagtttgagaaccactactcaaactaaactcccatttcagccaaagtgtcctatttgctgcattgggaacaaatcactgatcgcagcttgtattttctcttacattgaatgtcatccctactgttcacccatatgcaaatccttatctcttaagaactagctctaggcctatctcctttaactcacaaaactatatgccccatctcctcagttaaagtatttgagggcagatatcatgccctacaattcattatagcacaatctttaacacaccacttaataactgtctgttgagggccataatcagtgtctgagagctaacatttcctcctctaattgctttggctgtcagcgacgtctttatttagagtcctgtttttaagttcaccacaaaattgaaggacacaatcagagttcacagaaaatataaagcaagagagtaaaagtagggaacaagcttgtaatgatttaagagtaaactgaataaaggcataactgtctttgaatacaataacaaacatttatgagtaagagtgaccgctgtgaggaagtaaaaagagtcctagactaaagattgaaaactctcttttcatttgagtcattaaatgctaccagcgtccatacacagcgggtgggcatccatctgacttgtactagcaggcatccattctgattggtcagtgtccatgctgttcccattgttaagaattttaaatatcacttctcagtacaactaattacatgcctacataatgaaaatgtcttgctcttaattctattccttcctagtttgtcttctttcctatcccccatcatagtcgtttaaactcactactccctgccagacacttccctcatccccagcaactaagacaaaagggcatacttccatgttctttttacatttcccaaatttgttgattctacttttttttcctcagatgatgtttcaatgccctctctccatcaatgattttgtctcatccccagtcataaaaatgctcaagagttcaacccctaaacattttccctggactctgcctccccactcaagtgctgtccttatttgcctttcttttactttccatcttcttgataatctatgctcacttacatctccatttcttcccctaatcatacttcagccacccttaactgtttcctaccatcactacttcactaagaatattttaaaatgtcagaaatagcccattcattgctagattctatcatgtcttctcagtctcctccttacccaatctctctataccatctgtcattgctgaccaccatctttgaaacagtctccatccttggctttcatctcactcctagcacctgtcctgtatctttctggctacttccatttttgttggttcttttcaagtcagctgaaacctaagtacagcaagggagacaggtggtacaaagggtgcttgcaaaggagggtagaggggtagtgttgaggggagcctggagaagttggctgggacagatgacaccacttggagaccatatttaggctctcagactttatccaagtgggactgttgtttaaaggtttgaaaaaacatggcttatagttgagaattaaatacattcagacatttggatgatgaaaacctgaactgagctaaatgtgaaagtgtgctcaccactttccctgccaaggggtcgtagaaccgctccaggagctggaccactgtgctcttcccacagccactgctgcccaccagagccagcgtctggcccttcttcacctccaggctcagtccctgaagcactgggatgtccggtcgggtgggatagttgaatacaacttcaccaaatgtgacatttccttccaatgtgttctgcaatgagaagaataacagtaaatttgaatgctgcaatactgaaaataaagtgtatagctaactctctcgattaccaggtgtcagaagataattaatttgtgttacaattggcttcacttcaaactgctagaatttattttattttaattttattatttatttattttttatttttttgagacagagtctcactctgtcacccaggctggagtgcagtggcatgatctcagctcactgcaacctccaccccccaggttcaagcaattctcgtacctcagcctcccaagtagctgggattacaggcgtgtgccaccacacccagctaatctttttttttttatttttatttgagatggagtttcaccatattggccaagctggtctcgaactcctgacctcacgtgatccacccaccttggcctcccaaagtgctgggattacaggcatgagccactgtgcttgacctcagactgctagaatttaataaatgagatctaaaagagtaaaagctttcatagcatgtattgttaagacaatatgaatatgcaatacagctacaataactcaaatctgttcctcaggaatacagtaacttacatacaataaaatctgataaccagcctgggcaacataacgagaccctgtctctacaaataattaaaaaattagctgggcatgatggcacacgcttgtagtcccagttacttgggaggctgaggcaggaggatcgcttgagcccagaagatcaaggctgcagtgagctatgatcatactgctgcactccagcctggatgacagagtaagactctgtctctaaaaaaaaattgtttttaaaaaatctgattaataggttttgcttataaagtgagcagtattcctatttccctataacctttgctacgtaaaagtactgaatgttgatgtatattattagcagtaattgaaaggaatctatgatctaggaagttttattttatcatcagcatatttgaaagtacaaattttattaagtttccacttaaaatactttcattcaggagtcaggagtagatcaaacagttgaaacatcaaactcaccggcattaggccttccgtgctgtagctgtcaatcaaaggggttttttcaatgatcatgatgatgtgggctgctgatattttggctttggcatagtcaggagcaaatgaactgacttgccccacggccatggcaccaaagacaacagctgaaaatactctggaaagcacaaacacaaaacatgtgcacagcattaccatcacaatgctagaaagctgacactcctttttttttttttttttttttttgaggtggggtcttcctgtgttgcccaggctggagtgcagtagtgcaatcagagctcactaaagatatgatctccagggcttaagcgatcttcccacctcagcctctgtagtagctgggactacaactgtgcatgaccacaccagctaattgttttattttttgtagagatgggggtctccctatattgcccaggctggtctcgaactaccgggctgaagtgaacctcctgcttcagcctccaaaagtgccgggattataggtgtgagccaccatgcctggccaaaagttgacacttctataaccagagagctttgcctctaatagttataaaacagatgttaaaaataaaacaaacacatttccttataagttcatgtctatgtgatagattgattgcaaaatggcccatttttttccctctgtatacctctctctgtatcctcatcttcttgcactgtgacctttgcagcaccctttgaatctgggctggccttgtgacttgctttggccaacaggatatggtggaaatcacttttgccagttccaagcctatgactcagggggccttatatgctttgtgagcatgcatgcatgtgttctctctctctttctctctctctctctcagaattctgccactgtctcaaacccaggatagcctgctggaggatgaggcacacatggaggagagctgtctgaatcccaaccaaccagctacagacacaatccactacagacacatgagtaagtccagccgagatccactatgcctaatccagatcagtagaacttcacagctaacccataggtttgtgggcaaaaatatgtatgtctctgaggtttagtggctggttgttacacagcattattgtggtaatcaacaacggatacagtcagtgatgttggaattacatcagattcttaaaaacctatgaattgtgcaaccaaaagaaagtttcttacagagccagatatcatgttgctcttaagatgcattgacgttcttatctatgacatgggaatcacagcaacttaaagttgggaaggaccttacaggtatcaagtccagctctccatgttcgtgcctggacacctcccctaaattggcttccatcctctgttttaggaagtagcatgtttgattgtctattgttaaacagttctttttcaaactgaagaaaaaatttacttccttttacataagacaggcctacaagtcttgaaatattgctaaaaactcctttgcttctttgataactcctttcactgcccttctctagacacatttattaatatgctttttttaaacacaagcctggaacagacataatacttgggaacccgcccagaatacagggaattcatcgctttctttcctctggactctatgcctatgtttgtgtagcatattgtgtcattagtttttgtttgtttgtttgtttaactagcactaaataaaataccgatagttaatcttggacttgtgatcatttaaacctatgggacctttttctaatgcactgttcttcagacaggtcttccttttccttaacttggaaggttgattttgcaaacctaaatgccccaatgtcagcaactttcatcaattcaattttttggagtaaagcaatatatcaaataattatctaatcaaagccccaatgccagtgatacttggttttgatctctaggccataatcacaaatagcacctgcatatcatttgtccaatgtacatctttaatggaaatttagatgtctttttgggggtcatcctgagcaaactgtaatgcatgaacaactcaatgtttaaaaaggacagaaatactatactaacacattatactgccaggcttatatgattctggtttaaatataaaattatatcgctactaattatgttatgctatcaagaggcagaatcttacccacctccaaatctagaagctcagaaagattacacatacttttgaccaccaaattgcatatttgggtacttttgtagtataattgcttcaggcttatcttcctctgaccgaggtacaattatctacattcagaacaatgtagcagaaaaatcccaatataacttttcctttgtcatttctgaattcatttggctcttaccttccaattcctctcttatcaagggaaagtaaacatatcctggaattgccaaaggcttgcagaacttagtacaacacatctgtattttacttgctctgtaagaaagtcctttaaaaggagccagtcagactccttgctcagggctaggcttcttcccaaatgccaaggccttctcaaaatctccgaatggaatcactccactcagtcacagatttgaaaaggtcaactatgtgtgagccagcaatgaggaaagaagttactgctcctccaaatgaaagggggtgcttcaatggtggcacatgaagactcagaggcagaaatgccgatttaggaatcaccagaatctcttcatgaggcttcacagtagggtttcctatctagacatgaagcatgttcatcccagctttatttttagagcttaactaaataatagcccaatacttacaacagaacatcctcaaagctcatgagtttatgtgccaccaagtaggctccaaaccggaaacatccagcataggaaaaatacatcattgcctgggtgaaggaaaatgtaattccaaagatgtgtgctttcctcaaagagtttctgaaaagaagacatttgaaaactcattccactttcatttctcagtccttaaaatgtaacttttgataggttggcagtagggcacagaggcatgaccaacaaaaatgggtttcgtttccaaagaactaagtttggtcctcactttacacttaacagttgtgcaaatttgggaaactgcctaacctctgagactcagtgtctttatctttaatgtagaattaactacacctcaaagtgttgatgtaaagagaaaataatccaatgactgtaaagagccggttagggatcaataagtaaaagttatctccctttctccccacttttggacacacagtatggaagtactctacgtaaatattcattctgcacacagttacccaacacctacaaggtgcaggggccatgatgggttgacatagaggaaacaggcatgttcttgacttaggagacctgacttgagttgaattactatttatgcattagaggtgccttatgaataatctgttataggaagaaaggagaagcactaaattcttcgggggtctcagagaaggctttaaaaaggggttgacattctagaatcatgatatggatccagctcagtgatatggaggtgtgggtgggggcaggttagcaagtgggcagccctgggcttccaacccctcctgctaccagatcaactctgcttttaccttcatcacatatgaagatttcaaataatttttttttagacaaaaaggctctaccatcattttttttaaataaaagcttaaaaatccatcaataaagtccagctttccttttattataagaaacagactcagaaaggttgggcttgcttatgttcacaccacttattagagccctcactgggatgactgtattaaaggaagaaggtctgcactggagaaggggtaaaaagcagaaagacaggtaaacccaggaagcaccatcctctctgtgtcccacaggtacctcaaatttcaggttccataaataactcattttcaactagagcaaattatagggtcatatcctacctggacatcagatagtcattctcagcatcatgtctccctcccttctcatcagtgacccattcttacaggttctacctcagagatgtccctgccttagttcagggtcttgtactttctctcctgcataattacaactgtttctcaatggtttaccttcgagcactttctccacttgctccctaccttctagccaaagtaatccctctgaaaacaaatatgatgattgaaaaattattcacactctcctcccactcttcagcggttattacctgtatggtacctgcaaactctgagcatacatatgttcaaacttctgctcctgagtcaaagaaacaacggttcggaagttttctattgcttcagtagcgatctgtaacagacagcaccgatcaccaagaggcacaagagtaaatagtggtgattaatttgaattctataaaacagactaatgaaaataattttatgattacatatttattattatgtatgagcattttctctgtagaaaaagatactaagtaatttatcaaactgagttatggatctggaaggaagattgactaattcaaacttctcctttgcagaaatagaagctaagacttaaatggattatggcattgcttaaagccacacagctttacgtggcttcgcaaaattaaccagagaactcacagtacttctattgcagtgctctttcttctatgatgatcacattttaagttcacagttattttacacttatttttaaaatgtgatgtttatatttttctctttatcattgccatttgtgacaattgaagaatgtttggaaaatagtgaaagaatgcaggcaataaaaagtaaattttagatacattcaaaggcttactcctctctgcctgtggacgcttacccctttctgcccgtggacgccaccaaggaagcatccttaaagtctctctttcccctgccgtcatgtctaagtcagagtctcctaatgagcccaaacagctgaggaaattcttcattggaggttgagctctacattggttgaccaatgagagcctgaggagccattttgagcaatggggaatgctcatggattgcgtggtaatgagagatccaaataccaagcgctcaagggactttgggtttgtcacatatgccactgtggaggaggtggatgcagccatgaatgcaaggccatacaaggtggatggaagagttgtggaaccaaagagagctgtctcaagagaagattctcaaagaccagatgcccacccaactgtgaaaaagatatttgttggtggcattaaagacactgaagaacatcacctaggagattattttgaatagtatggaaaaattgaagtgattgaaatcatgactgaccaaggcagtgataagaaaaggggctttgctttagtaacttttgacgaccatgactccatgggtaagactgtcactgagaaatacccatactgtgaatggccacacttgtgaagttaggaaagccctgtcaaagcaagagatggtgagtgcttcatccagccaaagaggcaaagcagctctgggaactttggtggtggtcgtggaggtagtttcggtgggaatgacaactttggtcgtggaggaaacttcagtggtcattgtggctttggtggcagctgtggtggtggtggatatagtggcagtggggatggctataatggatttggtaatcatggaagcaattttggaggtggtgtaatgattttggcaattacaacaattagttttacattttggacccatgaagggaggaaactttggaggcagaagctctggcccctatgctggtacaggccagtactttgccaaaccatgaaaccaaggtggctatggcagttccagtagcagcagtagctacagcagtggcagaagattttaaattactgccaggaaacaaatcttagcaggagataagagccagagaagtgacagggaagctacagtttacaacagatttgtgaactcagacaagcacagtggtggcagggcctaagtgctacaagaagacatgttttagacaaatactcatgtgtatgggtaaaaaactcgaggactatatttgtgactaattgtgtaacagattcttttagtttctgttctgtggaaagtgtaaagcattacaacaaagggttttaatgtagattttttttggcacccatactgttgattgttaaatgtaatagtctgatcataatgctgaataaatgtgtccttttttttaaaaaaaaagtatattttacacatttccatattgtttttttcctaagtgcataaatatatttaaaaagattggaatgaaactctatatttagctctatatcattatttttaccttcatatcaaaagcattttccaagttcattaaatacacattaataatgagatgtgtaatgagtcctttaatatcataaccaattaagtattcctttattgttgagccaggttttcaattccttttttattaaaaatagtggtgagataaacatctttgtacctaaacatttgtccatattgaattggtttattaggaaaatttcttaaggtgaaattaataagtcaaagaaaactaacttttttttttagaaacggggtcttgctctgttgcccaggctgcagtgcagtggcaattcacaggtgtgatcatcatagctcactgcagcctcacacacctgggtaagcaatcctcctgcctcagtctgccaagtagctaagactacaagcacatggcactacacctggcttgaattaatttttttaattttttaaggaatgtggcacatactatcaatctgttttccagaaagttttgggctgggtatggtggctcatgcctgtaatcccagcagtttgggagatggaggcaggtggatcatttgaagtaaggagtttgagaccagccaccatcaacatggtgaaaccccatctctactaaaaatacaaaaattagctgggcatggtggcacatgccttaatcccatgctactgggaggcagaggaagcgctcgaactggcgagacagagattgcagtgagtcaagatggcgtcactgcactctagcctgggcaacagagtgagactccatcttaaaaagaaagtttccatcattcaattatgttgtaatcaaatgttacttccaacaaggcaatctgattaggaaacatacatccttcatcacctctggagtctgagtaaagggatatggaaaaagcaaagaacaccagtgtacaagatgagatttcagcctacatcagccgcaccaccttgaaccaacatgctgtctcattttcctcatttgcaaaatgaggacgatggactagagggtctctaaagtcccttttaatgctatgattttaagagaaataacttccagaattataagtcaccaagagaaatgactctttattgtttaagatgttcttcctctctttggcctctgcactggtcagaacagattctaataaagacacatttaatttagagtgttttatagcttaaaatcataaacatggaattccacttattcttcactgaatcttacataaattacctaacttcaaacataacagcaagcatttcataagacattaagtcagttttgaagactaatatcaaaatctatcagaagtaaaaaaaaaaattagtaacattcttagaaacaaaaacttatttaaaaataaaatttaaaatattattcttacactgacaggccaagaagattgaattatgtttaccacaagatacttagaaaattaggaaaatggcaggtttattttaaaatattgtataaacttcttttacacattataaaaatgatatatagtcactttagaaaatcgtaaaagtgcagaaagcaaaaggtgaggagaaaaaattcaccttcaaattcccaaagacaatccttttgtcagacacattagaaccatcattctcagcaaactatcgcaaggacaaaaaaccaaacaccgtatgttctcactcataggtgggaactgaacaatgagaacacatggacacaggaagcggaacatcacacactggggcctgttgtggggtagagggaaggggggagggatagcattaggagatatacctaatgttaaatgacgagttggtgggtacagcacaccaacatggcacatgtatacatatgtaactaacctgcacgttgtgtacatgtatcctaaaacttaaagtataataaaaataaaaaaataaaataaaagctgaagtttcacaagcaaaaaaaaaaagaaatatttctaattatcagaattctaacaaacaggttttctagattagtaagaaaattcaacagactataacaatgtctgctgaaaaacagattttactgtatatttcagtgtaatggttttaagaaatattttctgtgcaccatgttctaaggcaggagtgtctggtctgagattggtttgtaaatgtcattgctttttagtgtgtatatagccgaataaaagtgggagtttgagtcacagacctaaaagtggtgagtaaaacagtataataacttcaggactgtcttcatcttgacgcacaatgaagcaattaggaaaaggcttaattagcaccccgcatcctcacagctttgtttattccaagagttttaaatggagactcagtaatcaccatcaggagagagaatttctaatccaagaacaaatagcatcgagtttccctcggaaactgttgtgtactaaataattttgaagaaataaaaatgtatgtttctagaaagaaaaaatagcctcctgacattactcttcctaccctcaaataaacaagtttatggcttttatttctgaaaagtaaaaaagcatctacaatggagccttggacaacatgggggttagggagactgacccctcgtgcagttgaaaattcacatataacttctgactccccagaaacttaactactaatagcctgctgtcaaccagaagtcttaccaataacataaacagtcaattaacatgtattttgtatgttatatgtaatacatatttgtatttttataataaagtaagctagagggaagaaaatgttattaagaaaatcacaaggaagagaaaatatatttactattcattaagcggaagtggatcatttaaaggtctttatcttcatcatctttatattgaataggctaaggaaaaggaggaagaagagggattggtcttgctgtctcaggggtggcagaggggaagaggcagaggaagtggaaggggaggcgggaaaggcaggcacacctggtgtgactgacatgcattgtggtctctgtctgactttttccttttttatttctctaaaaatgtttcaatatggtaccaatccttcctccactgtttgcttcagtttcagtgcctgtatcacagaagggtccatgtcataaaagaagttaaaagcagtcctgaataaccgaaactcttttgccagattgcgtaaagttagttttctggcactgcttctcctatatcttcttccgcattgtttggcagtggtttggaaacactcatctttatcaagtcatcttctgttaattcctctggtgtgatgtttatttgctcttgaggttctccaaaatctataccttgaaagccttcacccaccacctttttttttttttcatatctcctatttctttttgtggtttccttgattggctctgtcataaatcctgtgaaatcatgtacatctggacacagttttctccagcagaaatttatcgttttaggattacagacttgcatgatgttcttctctctggtggctctctaccatagcattaacaatcctttctgtagagtaccatgtgctttgtgatgagccttaaaaatccttatgagtggcgaggcacagtggctcccacctgtaatcctagcactttgggagactaaggcaggaggatcgcttgagctcaggagttcgagaccagcccaggcaacacagtgagacctcatgtctacaaaaaatttattaaaaaaaaaaagattcttataaccccctcatctaaaggctgaattagagacatgtttaggaggcaagcagaccacttcaatacctttgatgttaaactcatgggttctgggtggccaggagcattgtctaatatcaaaagaactttaaaaggcagtccgttactgtctaagtactttctgacttcaagaacaaagaaagcatcaatgtaaccaatccggaaaaagtgctctcattgtccatgccttcttgttgtacaaccaaaatactggcagctgaggcttatcttttcccttcaaggatcagggatgaacagctttacacataagagcatatctatagatatggactcatcctaaaccggattgcatttatacaaaacagtagagttagcctactcctttctgacataaatccttggacttgcttctcttccttattaataaaagtcctttgtggcattttttttttctaaaatagggcactttcgactgcattaaaaaccttttcaggcagatatcctttcttctcaatgattttttttaatagcatctaggaacatttctgctgcctcttgattggcagaagctccttctcctgctatcttgacatttttttaaagccaaatatctttctaaaattatcaaaccatcctttgctggcattaaatgacccagctctgatccttaatcttacttttaatttgaattgactttgcttttcctctaatcatattagagtctataggtatgcctttctcacagcaatcctgcacccatgtgaaagctgcattttcaatatgagataaatgtattgtacaaaaagtgcaaggtttttgcacctgctgttgtagctgcagtgatggcttttacgaattttgtttttgttttgttttgttttcttttacaatggttcttatgctagattcatttatcttgaaatggcaggcaactaactgcagctgcagacctcacatctatagtatgtatcaagcagttcaactttttcctgtaatgtcatgacttttctctgcttgttgggagcacttccagcaacactagtgtcacttgatatgggttccctggtgttatttaatgtttatggtattgcactaaacatgatttttaaaatacgcaagaatcatgagagatcactttttattgcaatatgcaatttactggagagatgaactgctcctgctgagattgttagtgtcactgcattttaagcaggtacaacacttgaactcactgcagtagcaacaggaagtggctacaaaattactggggtagtacagtacatactatggttttattttatgatttaacactatgtattagtctgttctcatgctgctaataaagacatgcccaagattgggtaatttataaaggaaagaggtttaatggactcacagttccacatagctggggaggcctcacaatcatggcggaagatgaaggaagagcagagggacatctcacatggcagcaggcaagacagcatatgcaggggaactcccctttataaaatcatcagatctcatgagacttattcactatcatgagaatagcatgggaaaaacccactcccaggattcatttacctcccactgggaccctcccataacatgtgaagattattaccattcaaggtgagatttggatgaggacacagagccaaaacatgtaacactgtatctttacagttgttgacatgtgtcttgactgtgaatggtgacttatatggtctgtaagtgtttgtgtgcataaaatttgatcacttttaactttttttaattataggtttgtgtatatcttatggtagtaaataataagacgagtaactacatatattttatgcatttataacatacttaactttttcttaattttttgatatttctaggctacatggcttgtgagttttttcaaattgttgcaagtcttcaaaaaattttccaatacatttattgaaaaaaacctacatataagtggacccactcagttcaaacccgtgctgttcaagggtcacctgtattttataaaaatgctcactagtccacaataatgtgctgaaaaactgcagagcacagatcacaggcagggtagaggttatgagcaggttttgacatcatgcagtcagaataagtgtgggctctaatgtcacatacaccattaatcaataaacaaatggtacaccattaaccaataaacaaagaaataggaaagaaacatcaagggctgcgaagtatcatgaattaattcaggtgtcaggaatggcctctctgaagaggtaataattttgggatatgaataacgtaaagtcagccaagagaagagcagaggcaatcagcttaaaacattccaggaattgcaagaatgcccactgggccagggcacacaggcataagagactgtgatgccagataaggccataaaggtcatcaggagttagatcatacagagtttggtaatccatgataaaagattagattttgttccaagtatgatcagaagccatttgggagttttaagtaagggttggcattattagatttttatttatgagaggtcagaatgacttctgtaagaatgtagactatagttggataagaatggaagaagttgaagcagggagattggttaggaggctgttgctgtgtgactgtgagcaagttacttgatctctctgaatcttgggtttcattatctatccaacagggataattcaacagggttattgacagcattaaattagatcaagtatttagagctgttagaatgatacttgttatataagaagtactaaatagcagcttgagaagtgtgttcaggtggaagttgattttcaatattatgtggactggttggtgcagatccactactttccctacctacttctgtccctctcatgagccacccctgaattagaaaatgtatcacatccctgacctttgctcagaaaatctgccatatccacacataattcatttccatctgctccccttcctttggcccctctgacagaactccaagagtcttaaatctcatgtgtcacttcaaaggtgctaacctgtggtttgcatgaattagcttaggatcagattgtatcatcttcttcctaaaagcaatctaagactcccttctgggacatttcaaatacctcattaaataatgacactgttaactagaatgctttctcctttttttatattttgtcctagatttttccatcttctcaggggaagagtcaacaccatgggggagacccccaaagtacaatattaaaggaagtcattggcacagaatgtattccctggcaggggccaacgttacttgagccagaccacaatagaaccctgtgggtcagcaccatcctgatgtacctccagaaataggcctccgggagcctgataggatgcctcgcatgaggtttgtcccctacagacactggctggggaggtactacagctggcccaaaagattttccagagggaaccccccaaaaatgggataaagagtctgaagagatagcagagaggtaaaggacaaagcattagtggcaatgaccaacatctggggccttcttcatcattcacttggtgaggtagctgggcctactgacaaccagagccactctgatctgtgtgagtccctgccctaactcctgggaatctcagaatgttcatcacacatatatccctgtcctaaatgttagttatggcagtcagccctgctctgacctctcatttccactatgatacagatcatgtgatatcagactgcattctgccatcagaggaactctttgttttataacagaaagagaaacaactttggagcacaactgtctgagcttgaatcccagctccaagacctatcagctctaaagtccagagccatgacctgcctgtgcctcagccccactagaaaaatgagataatagaccccatatggttgctataaggaataagacatttgcctggaaacacagtaaatgccacataagcatttgttaaataatgggaaaaaaaagacaagtatgcaggggaaaaaaaagaagtaaaaaaagggtaaagataaacagaaataggatgaagggaggagcatgataaaaaaaaagaaagagtggtagtaatttaaaacagatataataaatacccctagcatttttccatatttaatctcccccctcacatgtacaaataaaatgggcttactttcctcaataaaggaatggatttaagcttgaaagaaaagaaagaaagcaagaaagcaagaaagcaagaaagcaagaaagcaagaaagcaagaaagaaagaaagaaagaaagaaagaaagaaagaaaagaaagaaaaagaaaagaaggaagaagggaaggaaggaaaaaaggaaagaaaagaaggaaagaaggaaggaaggaaagaaggaaggaaggagtggagagagagtgaaagtgagagaaaagaaagaagaaaataactaagggaaggaggaaagtggggaggaaggaagaacagtgtgaagacaatggcctgaaaactgaaaaagtctgttaaagttaattatcagtttttgagtccaagaactggctttgctactttctgtaagtttctaatttactgaataagcatgaaaaagattgctttgaggaatggttataaacacattcttagagcatagtaagcagtagggagtaacaaaataacactgattagaatactttactctacttaattaatcaatcatatttagtttgactcaccttcccagaaccttctagttctttcttatctttcagtgcttgtccagacaacattttcatttcaacaactcctgctattgcaatgatgggtacaattgctaagagtaacagtgttagttgccaaccatagatgaaggatataattattcctgtcccaagatttgctatattctgggtaattacagcaagcctggaacctatagcctgcaaaacaaaacaaattagagaaattttaaaaatattatcttcacaactcatgcttctattttctgaaaactcaccttcatgagactatattcattattttatcagtaatgaactaaaaagtaaaggtctacttgtaagtttattgagtttctacagtaagaatttccatgacttcagaatgctgaaagtagaatatcaacaatctagagttcaattacatattcctatctctttggatcttttaataccaagaaaaccttcattaatcacggcaacattactaaagcaatatctgcaaattagcaagataaaggagtctgacaaactaggaatgatggaaatttccaatgttaggtatattattatttgtaatttaagcctaacgtttgtcattaataatattcaaatatatctgggtctgtttgagatataatgtttaatttggaaaaaatacagagctgaaaattatggaatttaatttaagatagtaagcgcgcattattatcttccccttgaattccagagggagtctgaagcatgactttcactagtgtgcactgagttccagctctaaagccagaagtcaaactgcaaagtgaatttaatccaccactgtataatgtccaactgtaaaccagatttccaactctgaaaccaaaagtcaagctacaaagtcagtttagtccatcactctataatttagtccagcacatctcctctaccctggaaatattctgtgccctcaagccattccaaatgcctgccctggccccagacctgccttttctgaaaaggggctgggtaaaataaggctgagatctactgggctacattcccaggaggttaggcattctaagtcacaggatgcgacaggaggtcagcacaagatacaggtcgctaagaccttgctgataaaacaagctgtggtaaagaagccagccaaatcctaccaaaatcaagatggtgacaaaagtgacctctggttgttctcactgctcattatacgctaattataatgtattagcatgctcaaagacacaccagcgccatgacaatttacaaatgccatggcaacgttaccctatatggtctaaaaatgggaggaaccctcagttctgagaagagcccaccccttttcctaggaaactcatgaataatccaccccttgtttagcatgtaatcaagaagtaacaataagtataagcagctgagcatcccatgctgctgttctgcctatgaagtagctattcttaattttttcactttcttaataaacttgctttcactttactctgtggattcgccttgaattctttcttgtacaagatccaagaaccctctttcaaggtctgcatcgggacccctttctagtaacaatagaatcctttataattccctacattaatccctacaaaatcatttaacacctgtctgatataaacaccagactagtatttaggaaaagagtgctataactatcagtagcctttaaatacattaaattccataccatggagctgcaccagggctgaaagaggtatcataaataatagaacacctgtatattttgttgatgcaatcattgagcttatattaaagggatgatttgccaaatttgggataaatcagactggaatggttttcaaagccagctctctgcatttcacatctttagtttgaaggtcaaaggatgcaagctggagaacggctgtggcacagggatgatataagttgctcctgttctcagtatctacaagttctactcagagctcatttcccactgcagctactgacttatgggcttgtgagagaagctcttagaatatcacctagaatcacttctaggtgtgagttcatggcagaggaattacctggctatttaacttttcagacatataaatgtgcagctttggatagtagtgaagggccacagaaataaataagatggatcaaagatggcaaattctttaatgtaccaaaaagagtaactaagaagtctaagaccttaaactgcaaggagatttaacccctcggcttcatttgatttagcacttcagacattacactgattactattcctttattctgaagattaacactcactgtcctacatctatttctacagagtaggagtctatagaaatatggggactaagaagaatggaagagcacagattagtagccagaaaattttcattgtaaagactagggttgaggggaggaactaaaacccgtcagccaaaaacaggtcagctagtggtgtaaagtagatccaacagtcctctctcagtcaatctgtgataacagctacattgggctttcctaggttgacaatgtttgccaacctgctcatttcctcttccctggtctttcctttttagccactgttttaagttctggaaaacagttttgcttgagtggctcatataaggtgagtgcagccatcttggcagggccaagtttgaggtgtctttgaggaaacaagtgaaaagcagaaggttgaccccagcaggcaattagagacagtgaatatggcaaagggcctcacaaacagcactatggagggaaaaagtgaccaccaattttacaaatataggaactcactgtggcctaaggcaggtcataacaccagaggaatttgagaggcaggaagaaaaactgcaatacagaatgccctgaatacatctgctctgggttctgctgcaaaagactgagttgcctccaggattgtgtcttccacgtcaaatgtgatgcgggatatttgtccatcaaagcacatgagcccataccacagggtctgtgtcatattgtgcaatgtcacattgcactggttactgttcctttattccaaagactaatgctcactgtctcatgtatattcctcctacagagtaggagtctatagagttgtgaggaccaaaatgaatggagaagcatagtaaaacttatttagtaaaccaattataaaaaaggtttactaaagttagcagtgcaaatttcagccttcttgacatctacatatggatgtctaatacagacgtcacaaacttaccatgtctcatacagaactctccattctcccccaagcctgcttctccaacaggcttctgaatttcataaagatcaactccagctgggcatggcagctcacacctgtaatctcaacactttgggaggctgaggcagggaggatcacttgagcccaggagttcaagaccagactgggcaacatagggagaccctgtctctacaaaaaatttaaaaattagctcgacatggtggtgcacacctgtggtcccagctaccaggaaggctgagaagggaggattgcttgagcccatgagttctaggttatagtgagctgtaatcatgccactgcagtctggcctgggctacaaagagagaccctgtctctttaaaaaaaaaaaaaaaaaaaaaaactccatttttttttccactgtgcaggtaaaagaatttggagtcatctttaaataccctttctctcatatccatcatcttatccaaccaacacattgttggctgtacatctaaaatatatccagaattaattatatcttatagccttttgtataaccaaattagtctaaaacactatcatctcctcctggattactgcaacagactccttctatgcttgcccccttcggcctattcacacagtttctatagtgatcctttcaaaatttcagatcatgtcacttctgtgttcaaaaccctacagtggttttccatctacttctggatataatgctgaccttaacacacttatgactcttcttttcactcactttattccagccactctgtcttctttgcattttttttttttttgagacatagtcttgctttgtcacccaggctggagtgcagtggtgcaatctcagctctgcaacctccacctcctgagttcaagtaattctcgtacctcagcctcccgagtagctgggattacaggcgtgcacctgtaattacattctatacaacttgatctaaaccttgtttttattgttttgtttgctttaggcaaagaagtttgtattaaaacaacaattactaagaggagctggtactatgccttctgaaactattccaaacaatagaaaaagagggactcctaaggtttatatttcaacgttataactctatgtatttcctcatttatagcttaatttattcttaaagaagccccatatattagatagaagaaatgttagtatagtactaacttacagaaaagatttaaagataaagatggataaggttcaagaggggaaaagacacaccagagattacatgaattttttcaaattctacatcattttgtggacttttgccataaacagttgtagaagaaattgtcacttcagccaaaaatcaaaacctgctggttcaatagtatctagttatatcaagagattcatacagtagcaaaatttaagttattaaaattattaaagtttaaagttattaaagataaagactgaagttattctattcttgccttaattttttaatgtgcttttcatttccttcaacctatattttagaggattgtcttccctcccttctgtaaccatagtgactctaaactttcttacagcaattaaatacatcctttcttcagtagcaattactgttttatgttgattgagcactttatactctcttttctaaataactattctacatgcatcttgttaatagcatgaataacagcaatagcaaatggtttataagttatctatatgctctacagtatataatgtttaaatagttaacatgttgctacaaaaagcatgtgatatattcgtaggttagatatttattcaacattttcttaatgatgataactaacacccgtaaggagaaaattagtttcatgctggggtccaaaatggccaattaagacaaacaccagtagaaaggaggcacgtacccctttaacttgagcagcatcattggcgagcctggtagtcaatgctccagtggtgtttttagggtcatcaaaccaactcacatcctgtggcacagaaaatgattttattaccttaaagctgtttatgagactctcagctccaagagggcagcgatggggtcagttttgtttatacttataccccctgcatttagtactcaggatgtgacattcaatacacaagaaagaaacttaatataaaaacacataaatagatcatttcatttgtcagaaaaatttctgagtgcctactttctcctacgcatgatttctaagtgttggacctgtacgaacaaaaaagacaaagtagctgctttcatgaagtttagattctagagatggaaggtacaaataaaagaaaaattgagcagggtaagaagaacagaaaagtgaggggaggtgctattttagagactggggaggggaaacagaaggcctttctaaggggacatctgaacagaggcctgaatgaaggaaaggatgagaatacctcagggaaagcagaaacagcatgtgcaaagaccctgaggcaaaggcatacctaatctgttcatacaccagcaagaaagccttaaaggctgccagcagcctaaaaagaacctttgtatgaatttgtaaaagccacccccttcctctggacagatttgtgttctgatttggctcctctgatcctcccctcccctactcttgggcagtgagccactgtttatggagtagacggtgtattggaaaaaggcggttataggagatgagatttgagagagagtgggggccacatagtgtatggtcttacaggcgactgtcaagattccagactttaccctgtgagctacaggcagccttcagcaggtttgggcagtgggatatgatttgatttctattttagaaaaatgactgtggctgtttttaggtgaatctacaggattgggataaaaatggaggtagggagatcagttaggaagcttttgcaatgttaacagaaagagaagagtcaaagatggcttcaaggtttttagcccaaacaactagtagaacggagctgtcgcttactgatataggggaagagtgggtaaggaataaggctggtggggaggggaagagtcaaaagctccattttggaaatgttaaacagtgaaactcttattagacatccaatagagaggttgaataagcagttagataaatgtagctcagggcagtataagtgatttgagtcaaaaacaaatcagcaaaagtaatccagattaaaatataacattcaacataaaataagattttctttgtaaaaccatttatatttttaaatacacagatactaacatgattgtgaatttgaagtatgaatttatatgttttacaaataactgtggtccctaagaagttatctaaactggttatttacattaaagaagtatctatcatttttcccaaaaatatttaagaaaaaatagtgctataatttattatagtatgtatcaacttgcttttcaatattcttaagtggttaaaagtgtctccacacaggaatgtaacttccttgaacacagggaccattcaggtttgaatgccttacaatactaagtactagaccttgtaagcagaaggcacttaataaatgcttgccctacttaacaatttatggaggagacattccacaaaccatcagctcagctgccaaagtataatgggcacagcagttggcctggaggctggttgggtaatgggaaatttggccctggagcaaggtcagtgtagacctaagtggaatctgacttataaatacagttcgacctgacagtccaaggacagggtttcccatcaaactgtgctctctcacttagattcagtcctggctctgtcagtcactagctagcaattcccataaatacattttctttctaaatggtgatgggaggaatggggaagaactgaggaaccagagacagctggtaaaatgtgaatgccctctagaaagcctaacacaccaaactgatgcctcttagccagggttcgagtacccctggcacatctggggcagacttctaaagcatcattttactcaatggcaagtgattagtgatttttaaaacggaaagttattaggtcacatacaaaattttcatgattgttaaaggaactttcccctttgaaccaggctgctctgagttacattcctctaatttccttccccatttccccaggaaaacattcacacgtgtcaatggttagggttttgaagctgcaaaatgtgagaagcattccattaaacccattatcagccagtaacactgcagcttgaactagtatttcagactagcctcagaaaagaaaatgggcagtgaagaacaggacacagggatgagttttgatttgcggaaagaaagagtacagagggcatctcttggtgggaagaaacactcgtgccctgggtttgccaggagaaagaaggaaagagaggaaagggatgaggggtatcaaagatgccttctgcctgcactgcccaccactgctgagacacaggctggaggtgaatccacgctggaggctctgtctcaaactggtccagttccttgtgcccacccagacctgacagacagtagagcctcatctgtgcctagtgggcggttcaaccgcatctctgacgtgagactgagggacaaccaatataggagctaggcctgggaaacatgacagagctcccactgtctgagtccaaggggcacacatggggagttctacacatcccagggcacagccctcgatagacatacctgtctgagcatggatcggaaaaccatgtatcggagccgcttggtgaggatctctccagctttgccaaatgtgaaaccctgtgggcaggaacataccttgtcagggacccagccaccatttaaataaaaggagggagaattgatgtctttgctaaagcaggagatcagacaaagtcagaaagcctgatttcaagggcttgctatgtttctgtgactgtgtgccatggcacaaggctgtacgggtggtgtagacagaaaagcccactttacagaagaaactgaggcttagagagcctgataagatccatagcccacagttataaggtcacagagttggaatcttaatccagatgcatgagaatcctaaccagaatgggaatccagagcctgagcttttaattacccactggactccctccccatgttactaagatgaggagttgggtggtctaacatctttaggcattttgctatctctagacttctaaggtcctataactcatagactttgttctcacctgttttctaggcaagctaggttccagtccccccaagcaccatgttatgaaggtagtcctctaacttcttttgcttcaccaattcaaatcgtcaacatttaagggaccagctcaaagcccacctcactccaactttcttaaccaaatttacattgagcaatctttacctcctccaaacacctgtggtattaatagttggtatggcaatcctataagtagttagagtgtcacatttattctagtaaggtcaaattccccagtgaggctgtaagtactcagtaaagaaagaattcagtctgttttttcttttgcacctcttataatgtccagaaaaatattctattttttaaaaatgtaatacatgcttacatgttaaataaagagatctagtcacagttttatctttaaaaattacaggtggctaatcattcaattaataagtgattacctactactgcctcatgcaggcctgagcacttggtcacatgatccttttaatcatcaagaggcaggtacctgcatccctagtttaccgctaaggaaacagaggcttagacagtttacttatgtgcccaaggacacaaaatcagaaacaggtacaaggagcacttgaaccaaaaccaatactgtcttgccataccaaacagtatttatttatttatttatttatttagagacagggactcactctgttgcccaggctggagtgcagtggcacgatcatggctcacagcaacctcctcctcctggcctcctgggttcctgagacatttcctgcttcagcctactgagtagctgagactacaggtgtggatcaccacgccctgttaatttttgtatttttagcggagacagagttccgccatgttggccagtctggtctcaaactcctgacctcaggtgatccactcacctcggcctcccaaagtgctgggattacaggcataagccaccacacctggccctcatactaaacttttagagtacttaattccttgccatttcatttcagccaaatgatttgcaagctgtaaaaatctgactctttacaaatgtttcctacattttttgttggaggattgacattcttccatcactgaaatgattctttctccttgaacaaaagttgaacgataaactcttcaaaccctttttaaacccatgtgacccgcttatggggttttgtttgtttgttgttgcttttagaacacgggaagacatttctttgagtatttacatttactggcaatacttatatccaaacttacatccagggctcccccacaccccattttgaagtccctgcctttcacctccaatcatcatatcaggccaaatactctgttccccctggtttcattgcgggaggtaagggtggagaggagaaggtaagcaagggagccagaggaggcaaacatcttttttcactatgtcagaaaaacttggctgttagtagccatgttaatagagaagttctactaaaaggccaattacactgatgtttataaatccccccagttgaataatgatgcatttctcaaaatgaatatagtgaaaatggaaacatttacctgaaggaaaaatgtaataaaagaaataattccaagggctagaaacaatagtgaaaacaagttactattctgtcgttttgtttcaggatcatcaattcttgtaaaaacctgtgagaaaacatttaaaggatttttagttcaatcagtgaagaacccatcctggacctgacccatttcccatctggcccagtattcaggggtcaggagagccttagtacgctggaaattggggttggctttcctattgccagccttaaaggtgtctgcattctcccttctgtggaggccaaggataggtctatcattcataaattgatccagtattttttctgttcggattccctcttggagtcatgagtgccacctcaactgtgtaaagttgaaatcagaacaaatactctcctcttcccttggtggggaactacatttatggcagttcattgctttactatttggacatttcaaactgtcccaaggtgtctggggaaaacctgatgtggttttttggtgaaccacagagtggtggtcattcactcagcccaggcctttcaaaaagaaaggaatttccttgagcctgccttcttggtaggatggccagttaagagagccagttggaaactacagctacctgacctagcaccatacctgaaattttttccagagatagttataagggctaataggatgttttggactcaaggaacacagaggataaccattcctcagggaaagaaaacacgtatctcccttcacagtgggccaaaatcagtcttgtaagatagtaacattcctagcccaggacagacaactttatccttcataaaaaaacaaacaaataacaacaacaacaaggatttttgaagagattaaataattttttttgactagtcagtccaacaaaaatcataacaattaccaaattcttactctatgccaggcattattctaagcaaattcatatatactattcctctaatcctggcaactatctccagaagtatgatttattatcatcacggttttacacagatagaaactgaagtacagagaaggtaattaatttgctcaagttaacacagccagcaagggatgactcaaggatataaatccaggcaatccgatgcagagcccactatcttcaatgaggcagatgtctggttgcctactcaatatctaagagctaatatcccagccctgggtcacttacctccagacttattgtcatatgaagaatgagaaaagtataaaatcataagttgaggttttgttacaaccaaacccattcctaacttaaccatttcctttttttttttttctctgatgacaccacagtctacccccgccaacccccaaaacctgcaagacacatgttagtgcaagaatcagcaaactatgggccactggccaaatgtttatataaagttttaatggaacacagtcgtgttcattcatttccacattgctgttgtgtactactaggtcagagttgagtatctgcaacagaaatcatgtggcatgcaaagcctaaaatatttaccatcttactgttaatagaaaaagtttgctgactcctgccctggaccatatactctacagaatcagacatttgatcacattctcggaattttttcaacaactagaaaaatacctggcacagagcagacacaaaaaataattctagaggccaggcatggcagctcatgccagtaggtggattacttgaggttaggagttcaagaccaccctggccaacatggtgaagtcctatctctactaaaaatacaaaaattagccaggcatggtggtgcaggcctataatcccagctacacaggaggctgaggcaggagaatcgcttgaacccaggaggcagaggctgcagtgagccgagttcgcaccactgcactctagcctgggcgagagtgagcgagactcaaaaaataataacaattcttgaataaatatatttaatattaagcatgaatgtcattaaacatgaattcatgaatgaatatattaaactgaaataagctaaccaggcatgagtagacctgaatagtcatatatattttgtagaatcaaaagtcagtgtttagcttatgcttcttgtggtgatcaatctctttctccacaatgttttcagcagttatggcaagggtgtcctcagcttgatgtttggacatatgtcactaaacagagagcattcctttcagattgtaactttactgttgaaaatgccaccattaagatgaggtggaactaacacatgtcaacctcaatctttaggaagccgttcctatttgttttaatcttagcaagtgggatgaaaattacatcttacaaaagaagcatgctaggcttactcacatcctggaaagtatgtatgttagagaacagtgcattctcaagccagcctgacaaacatttgaggaactctctttgcacattggtgaaatgaaagttcacaagatttgttcagagccaaatgttggcaggtatgagaaagtcatctcatcactttcattgactatttcaggaagctggtctttagttgcccaggttagaaaccaactgtgatgacaaaggaaggttcacaaagttagctctcctatcacaaaccagactgctattcttacatcttcaagccaattagtttcatatggagatacgtggattttgttgtttttgtatcccagttcagacacaagcactttattcgttcattcttccatcaggattcacaagtaaatcacacaaatgggcatcacacttacccctataatctttgaaaatattattgcaaatgctggttgcaggcctccatttataatggcacaaaatacaccaacaacaaaataaggccattcagttaaatttagcttcataatcctccaaaaggaaactggaggtatactttcatcctagaaaacacaaattattacaacaggctagttaaaaacttttatatgtacaattcttacatacgcacaaaaattagtaaaggaatatatcctatccttattccttatcaatgaataagtgatgacaattttgctttaaaaaatgtcatagtgattattatttagcttcaaaaaaatgttgacaaattttgctacaatactcctttattttttaaaaaataaatgatgtttccacaaacacttacttttatttggtactcagaacctgacaagagtatttataagcaggagtaaacagaatggaaattttgatatttgaagacccgctatagtctctttacactataaattttaattctaaaaattctgctgtgtaaattaatacttttaaattctaacctgattctaaaatgttgacattctgggggataggacaggaggattctggataacctctcttgttcccactcctactgtagccctagcccaccaaactagggaaccacagttagtgagattaaaacaaactccgcatctcccttcataccagagcctctttggtactaagctttctgtcttgggcttgtgatccacggacactcctacgagttgatctttttcttattagactggatcttgaatcatttgaagacatttccaaggcatcaatttcacttttggattcatcagctgcattttctaattcaacttcatttcctgctgtctaaaataaataagaaatatgcaaaagctcattaggctgtgtgttaaccaatgaaagctaatcactgaatgtcagctatcaaggaaaacagcaatttgtttagtaactgcagaaaaggataaagctaatctgctgtgttgttttatgtgtgtctgtgtgtgtctgtgtgtgtgtgtgatatttgaaaacgaaaaccaccaaagaagaattcccactgcatatactgaaataatctggcattcattccatgtatcttatcttctcacgccattttttgtgggtgttttgactcaatcaagtttactctggatcagtgctttcaacagaaatatggcacaagccatgctatgagccatgttattttaaattttctagaagccatgttaacaaatgtaaaaagaaagaagtgaaattaattttagttatatattttatttcacctaatatatccaatatattattgatatcccatgatatcgtttcaacatgtaatcaatataaaaattgagatattttgcattttttgtactaagtcttcagaacaagatgtgcacactctacttaaaacattccaattcagattcactaccatttaaatgctgtacagacacatgtggctactgactactataacggataactcaccttgaaaccttttaatttttttatctgtttatccttctttattttcccctctttcaagagagaaaaaaaatcttaaacactggtctcatcctgaatcccccaggtgttgtttcctactttgtaaggtaatcaaatcaaataatatttatttttagcattaaatgcaaaatcagtttatcactgagatgacttaggaaaattctgaagttaaactatacctgcattgtgacaagtttgaagtaaatgcctttctctttcatgagttcatcatgatttcctttctccacaatgactccatcatcgaaaccagcgatgacgtcagcattacgaactgtagacaaacgatgagctatcacaatggtggtccgaccttttctggcctaaagagagagaaatttggtttttgaatacattaacaattacctgaagaaacttaaccattcaacatatatttactgaaccaatgctgtgggcattgtaaaaccatcaaatctatataagatagcctctgacttcaataaatgtatagacaattgataatagttaaaaatgatgtttccttgtaataaatacaaacacaaatataacagtcacatattaatattatgtaagcccccaaatattttatttaacctaaatttgcagtaataatcaggggcttgggccgggcgtggtggctcacgcctgtaatcccagcactttgggaggccaaggtgggtggatcacaaggtcaggagatcaagaccatcctggctaacacagtgaaaccccatctctactaaaaatacaaaaaattagctgggcatggtggcgggtgcctgtagtccccgctacttgggaggtggagcttgcagtgagccaagatcgcaccactgcactccagcctgggtgacagagtgagactccatctcaaaaaaaaaaaataaaaaataaaaaaataataataatcaggggcttgtacaaaccaacaaattcctacagaccaggcgttggccaatcaaaacaaacacaggccattgtgctgtactgatacacaccggctagtaatcagccctaggaattataatatcctatcccgcatgaccccctggatgaacaagacagacaataaatgtgaggcagcaaagtccagacctcaatgtcacactgacctgaaataaatttatgaatttattttatccaataaaatattttatccaaggaaactgtgtgagactcaatttattcatatgtaaaatggggataataatagtatttacttcttagagtagttgtgatgactaaataaaataaagcacataaagtactcaacactgtgccttatccatagttagtgatacttattcctaggttgaagaattatggaaaaattgaagagtcacgtaagtctcttttattttcataaaggaacagagccagatatccaggccttgtctgagacttctctaacctttgtaactttcccaatgctcataatttttgttactctatatgtctctctaataactagcaatacaattctcaaaaccaacacacaacattttcaggatccataggataagtagaagtggaaaacttcaaaaagaaaaaatacacaaggaaaaattaggtggtagaaactagaaaatacagaagaaaatagatcaatttttgtatctttttaagaaaaaaggggtatgtggaatttcccctcaaaatttacaccctaaagtattttaaaatataaccttttaaaattgtttttatttataatttaatacatagtttcactatagattaataaggaaacacagataagcaaaccagtaagcagtggctcactcctgtaattccagcactttgggaggctgaggcgggaggattgcttgagcccaggagtctgagaccagtcggggcaagatagtgagacctcatctctacaaatatatcaaaaaatagctgggggctgggcacggtagctcacgcgtgtaatcccagcactttgggaggccgaggcaggtggatcacctgaggtcaggagttcaagaccagcgtgggccacatgacgaaaccctgtctttactaaaaatacaaaaattagccaggtgtggcggtgcatgcctgtaatcctagctactcaggaggctgaggcaggaggcagaggttgcagtgagccaagattgtcccactgcactccagcctgggcgacagagcgagactccatctcaaaaaaaaaaaaaaaaaaaaaaccttggcatggtggcacacacctgtggtcccagctacttgtgaggctgaggtgggaggatcacttgagactgggcagcagaggttgtagtggccatgatggcacaactgcacttcagcctggtgacagagtgagaaaagaaacaagaaaagaaaagataagataagataagaaaagaaaagacaggagaggagaggaagagaagagaagagaaaaaagaaaagaaaagggaggggaggggatgggaggggagggaaggggagggaagggaaggggagggaagggaaggggagggaaaggaagggaagggaagggaaaggaagggaagggaagggaaaggaagggaagggaagggaaaggaagggaagggaagggaaagaaagggaagggaagggaaaggaaatgaaaggaagggaaggtcaggaaaggaaaggaaagaaaggaaaggaagaggaagagcaagagagggagggattgagggagggagggaaggaaggaaggaaggaaataaagaaagaaaaagaaaaacacagagatgaaatcacagattaagcaaaatgaggggaaaaatagtaaccagaatcccatcggcctctattttggttcacagaatgtttagtaagctgctttttttctctctcaaaaatttattaagcacattgacaggatgttaaggaacattcaagtgttgttttattagagacagggagagttgaaacaaatatgagttcatctttgaattctactgtgacatctcaacttggaacacctttggttataatgtctccatctccacattctcggtcctcacagaattatccccgttactatcacgtgctggagatcaaaggcacagtgcccggcacacggcaaacactcaaatgctatttggtgaatgagtcatatggactccagaattgcaggacagtcaaactctgttgatagtcaataacctgtcatggcttaggtaggttttcagtatcacaggctatctgcccctttcctggaaataagaggtttcttatttcgcatagagtcttcaagtggcattcaacacctggaaaattatatatggaccttcaggttgtatttttctcttcttggcaatattacaaactctcaaaacctaaataacagggttatccacatagtcaagttttgaagatcacaatgaagatgaactttcacatgtgtctatatttctattttttaatttaaaagattagcaagtgtcttcaaatgaaaatgtattcatcaacatttaaaataagatcagagaaataaatagaaattgaacaataaaacaaacaaatagaaaaagatttcaaagaggcccaatgcttttattttaatagctgaaggaatcacctagaagctatcagaaatttccttttctaagaccaatattaacaagaattagtagtagaatgttcttatgcttataaatcaggttggtttgaactaagcctcactgaccttatccagagccacctgaaccactgcttcgctttctgtgtccaaggctgacgtggcctcatccagcaggaggatcttggggttgcgaaccagggcacgtgcaatggcgatcctctgcttctgcccaccactcaactgggcccctctctctccaaccagggtgtcaaatttctaccacagaaaacccagaatgatttagcataaggacaagctatctcagctcatattttaaattggtaaggaatcctatacacagcccaagtctcacaagtaatacaggtccagttctttaaatcttatttaacacaataaccaacctcagtttttaaaaatgtatctacgaccagttgatactgctagagctttcaaatctgaagtaatcttactttcccttcttaggatttcccttcttccgatttatagtagtttcctaacttcctgcatagtaggcctgcattttattttttgcacctctagaaaggcaaagggcaaggacaacttacatgaggcagtttcatgataaagtcataggcattggcttccttgacagctttctcaatctcatccatggtgacattttcacggccatagcgaatgttttcagctatcgtggtggcaaacaatacaggttcctgactcaccacaccaatgatttcccgtagaaaccttacatttatggtcctaatatcctgtccatcaacactgacctggaataaaaagtaagtgtgactttcatacatttgtaattgaaagggcaacatcagaaagatgtgcaatgtgactgctgatcaccgcagggtctagctcgcatgggtcatctcaccatcccctctgtggggtcatagagcctctgcatcagctggactgttgtgctcttcccacagccactgtttccaaccagggccaccgtctgcccactctgcaccttcaggttcagacccttcaagatctaccaggacgagtgagaaaaaaacttcaaggcaattcacagacacaggatataggaactgactgttcactaggtttaaatatacatgcacttttttataatctctacaagaaaacatcagaaactcttcattcaatagattaattgttgattaatcatttatcactgtaccttaacttcttttcgagatgggtaactgaagtgaacatttctgaattccaaatttcccttaatattatctggtttgtgcccactcttcgaatagctgtcaatacttggcttctaaacagaatcaaattttaagagattactaggttacaataactacttttagtgatattttgtggagagctggataaagtgacaaagaaattgacttaactggacaatcttttagataggtggatagatggccaactcagacttacattatcaattatcttgaagatttcataagctgctcctcttgcatttgcaaatgcttcaatgcttggagatgcctgtccaacactaaaagccccaattaatacagaaaagaatacctgaggaatgtgaagaaaaaccatcaggctactgagatagtgacagcaattttttttcatacttcttctgtctttttctaacataggtaattaaaatttaaaatggcgaggcaacatataaatactaggtgttaaaaatattttaaaagtttgtaactaacagtacatttaattccttttttcattttttttcctttttaagagacaggttctcattctgtcacccaggatggagtgcagtggtgcaatcatagctcgtcataacctctacctcctgggctcaagcaatcctcctgcctcagtctcccaagtagctaggactacaagcatgcaccatcacacctgactaattttttttattttttctagagacagggtctcgctacgtgtcccagcctggtctcctggcctcaagcaatcctcctgcctcagcctgcaaaagtgctgggatcacaggcatgggccaccacacccagccaagagtaaatttcaaatgtgtcacctcaaaaggtgtcaagtgaggagatagatatgttaattagcttgctctgatcactccacattttgtgtgtatgtgtgtgtatacataaacatcacattgtattccgtaagtgtaatgcaattatgatttgtcaattaaaaatagcataaaatttttttaaaaaaattttaagacaaggtcttgctttgttgcccagcctggactgcagtggtgcaatcttggctcactgcaacttcaacctctgggttcagacaaccctctcacctcagtctccgaagtagctgggactacagacaagtgccaccatatctggctaattaaaaaaaaaaattatagagatgagatctcactatgttgcccatactaaaaatattttggaaatataaatacttttcaatttagaatgcagaattagtcttacttgctcaataaacaatgatttaaatttcacagggctagaatattataataggatatttttatatttcttcaatgtctagttttttttttatttagatcatcagtaaggtaaagtggaaataaatgctagcagaggagtcagaagacccagttctgaatcctaaattagtaataactagttatatgttgttaggccattctcttagaatctttggcttcaatttcttcattggcaaaaacaggcaagattctatctgttctccctacccagcaatcatagagatgttgtatcatgataaaacagtgtatatgaacattttttgttaattataaagcacacacacctaagacactgatcctttatcaggttgtcttttttgccacaaggccgtgttctctttaggccttttgtttttttgttttgtgcaaatcagtttcttattggtaaagacttaactgtgtttctctttggggttgatgagaattaatgtcattattcattttttctaaatcacatggaattatattgctcaataatttacacagaaggaactttgctaagtgattctatattcattatctcagttagtcctcaaaacacgctgaaagttagggttcattcctgtcatatcatttggcagaagaggtagcagaggcttgaaaagtttagctggctgccctaaatcatacagctaataagtgacaaagctgccatttgaatcaagttggtccgatatcaaaccccacactccctattttggatgcctccagtgtgtgaagtatattcatgcccagtgaacactggatttaaactgcttatctcaatcacagttaaacagaaaacatctgttatgacaaccaaggatcacccacagcatcactatactaaaaaaaaaaaacttcatgggaaaagccattccccactgagcaatgttggataaggcaaatttgaaaaaaaaagaaaaagaagtgattattgaatccatattacaaatctggctcctgaaaaagggaattgttttaagggattctacaaaatatcatctctcattgcctcaatctatttctgcttggcctacgaaaaaggaactaagtgactcttctaacagtgtattttattagatccagatatgaattgagtttggtttgcaaattatttcattgtctttaaaataaaagaggataacattaaatggcaagacttctgtgcttgcacaaaggtctataatgcagaaaacttccaaacaatcttttaggaagaggaacaatttatacttccataatttgtgaggtggattagctgccattcgaaataatttgaaaagaagtcaaaatgtgtattttgccatttttgtgaatagtaaatcagaaaataaaagtgaagtgtttagcaacaagtttggcacaaataatctcaacaaataaaagttcatgctattgagattgctaacgttaatattatttaggctacaggataaattgtgcaagatatctgcaaaaacaaacaagcaaataaaagaaaaaactggttgtcggatgcatctaatttttttccactttttttttttttttttttttttgagacagtcttgctgtgtcacccaggctgcggtgcagtggcgcaatctcaggtcactgcaagctccgcctcccgggttaacgccattctcttgcctcagcctcctgagtagctgggactacaggcgcccgccaccacgcccggctaattttttgtattttttgtagagacggggtttcaccatgttagccaggatggtctcgatctcctgacctcgtgatctgcctgcctcggcctcccaaagtgctgggattacaggtgtgagccaccgtgcctggccttccactttttaacctagtagtgcatatgtctgtagtattcaacagttgttcaaaatatattcttctaaagtcaagccaacattactggatttcattggcattttataataatggttcatttctcaatgtaaaccacttacagtgagtacttgtccaatagaatattcccctgagaggaccaaggtggtcccataccagaaggccagagcataagatgcatagatcagcaggaaagcagcacctatagaaatattggctgtaatagctttctttatcccaattcttttagcttcttctaaatttttgttgtacctgagaaaaagaacaaaaatgatcacatatacattttatgaaaacatgtcgatatagcatgatagttacagagtggctaggatgtgttcagtcctgtgatatacatgcattttgtcctgctgctcatacattgaccctatatagtagtactgttttactccctttttgcagaagaagaaactgacatttatagagattaacttatttgtgggggagtcttctaaaatttccttctctggctttagcaatagcaaataagtgaagcaatatttagcaaacttctaaaacttacattgtttcatacacaagacaaagtaaaagccatggaaaaaacctgtgtctttccttcaaaatctgcatgcctctttaattaataaaatggagagataatgttagaaagtactaaaaaaaaaaaaaagggacagtcatttaaatctctgaacattaaggaagtttggagacagtttgctctctgtcctgccttcctctaggactgtcggaatgaccaactgagaggttacatgtgtgagagcattttgagagttctgaattgccatgtaatactttttacatttaaataagctgtacaatttatcttacttccgtagacatttattttaaaaatcactgacctacaaaaattatttggcttacaggtttataaaagcacatcattattcatcagcattccctctcttccttctcctttctacatattgactatgtgtccttccctctattaatgctcccaacacttgtcatgccatagctgccagctgctgaactaacaggatctgacctggtggcttgggccatccacggcttctgactaactcaagggctgagaaaaattaaattattagcatatctatagccctgaacccattcatagcacaaaggcctaccctacattaaccaaacctggtgaggacccattaatacttcttagagcaaatataggaaattgtacaaaaggggcaaaaatgagcaaatgaaaaaaaatcgaaaaacaatgttggagtcactgacagattttatttctgcagttctaatgacttacaggttattcccaactgataattcaaatattttttaaaccctcagagggtggtcaatttttgacggtaaagttaaaggagatgatgtctataactcgaccttcatttgaaaggaacagagaagactactctgtttaagaggatagctatggagataagctaatggagcccagagttaaagaaaaataaggaattttgcaaatgtagaaccaaggtaaaaggattagagaaacaggacagattgccttaaatctgtctgtattttcttaatcgcaactccctgcagaacctagagcattgccttggatagaggaggagctaataattgttgaaattcatgaacttacttccatataaaagtcatactttaaggtctttgatccataaattcacaactatataaatattatatagcattatattaatttcctttggagaacttgttccattagcatgtacagcagagctcaagcactgtccagatatgaacatgcattgtttcttgctttcatgactactttaactaggtacattacagagttacaaaagcatgccaagtgaaatttacatcactaccgtgttcactaaagatgaaatttaaacagaacttcatagtgacaacatagcaacacatcattagtttctaccccccaaaatgtaaatcctcaacttgccagttatcatctgaacagaaaaattatttttgagaaacgtttcaattatttatatacacatatgcacacacacacaacacacagacacatacatatctctcactttatgagttgatctgaggtaaaagctaccactgggcataacttacataagaatatatttaaggacatttaatacatatgtactatactctgttatctcctttatttcagttctcgcttaccaagactaacgtagaaaccagtctgatgttgtcctatgcagccagaggaaacatttgcacagaagcacaaggaagaaaatcatttagacatcagaaaggagaaataaaggaaagaagggggcaaagggaaatgagatataaacaatactccttttccataagctctttgttgtttttccatacaaatgccatacataaaactagatattaaaatcatccattcatcaaaggctttagtacagaaatggtcatgaaagtaggaatgactaaaagagactaaagttatataacaaaaccattggtatgtaggaaatatgactcttcttaaatattgtgaaaatatttatcaataatgcaagtaactactttaagaataaggaacaattttggttaagccaacagaaataaatattaatagataaatatattttcaaggcacataaaagagagaaaaatatttttaagtgaaaaggaacaaaactattctatacgattgaatggaatttattttaacttctggttaaatttccattcaaagagagccagcttccctcctgcactgctaatttgaagagaaagccagattaagacctcaattactttatgtagaagcagagaagggaaggagaagaacaggaaagaaaactgattatgtctggtctaagaatagtcatcaattctactttcaagttatatcccaaatctaggtacctgtcacccctctcctgcctctgctccagatcagggagatgctctggcctggaccattctgccggcctccccactggtctccctgcttccaccctttgacttctcgcatccattcatgagacccattacagacaaacaatctgaaaacataacgtggatagtcattcctctttttaacaccctcaaccactcccctgtgcccttagaatacaatcctaactcttcatcatggcccatcatccccacattctggcccctgcccaccccaatctcccctcattcaactgagcttcagtcatgcaagccttatgacgtttcctagaacatactaaattcttggccaccccaggaaacttggaagactcttcttcaaacccatcccatctctgttcccaccatggcttgctttttctcatccctcaggtctcagctgagatgaaacctcctcaaagaggcctgccccaaccaccgtatttaaagttaacttgaccattcatcatcctcacactctttgattctttcagatcacatttttaaatcaatatttttatttttttctttgacgattccttatatttcttcctccctttctccattccttccatttttatccattttactattttgactgaagatcacaaaataacctctgtttctgattcacagctgaaaacctagagccctagctttgtttagaactttataaaataaaaaagaaaagaaaaggaaaacctagaacctagcacagtgcctggcatgttgtaggtgctgaataaatttgtcaaataaataaactttaaagaaatggccaacttgggaaggacattaggccatcagtttgtagtcttacgtcaattcttgatctccaagcaaaattagtttcagttctctgaaggagactgccctttcaaagatacattcaagtaacttatattttctgaagaaatgattccacatgtaaaatactacttagagcaaatataggaatctctggatatagctgtgtaagtccatttgtttattcttctaattaaaatttgatcatttttgctaggaaaaatattttcatatctaactaattaaagcactccattaaatctgaatccctttaaactttcagtgaactaaaatatcagatttatctaagttacaaatgttgggcttcactcccacaatgtccatttcctccttctcaggttttattccatccatcattatagtttttgttgctaataatgtccttaaaaatattgtcagttcctcaaatttaagatgtctttaattgtagcaagtactggtattctgtcattttataaagcattaagaaatgagtttaatagaacattccatatgcagctaggactcaaagggctatacctcagtatattaagcaacacacagcagaacttgcatgtctcagtcttggcaccaaccaggtgaaggaaggaaaaaaacctccctgagaatctggaccacaaagtaggactcatgcaggtctgagcatgaattcacactaccagtgttgtccaaaaacaactagacacataatttaatgtaaggtggtctcaggttagcagtgcccttggtgaatagcagaagcaaacataaatcctgcctgatagaattggacttcaatccagatccatagcaaatttaagatggcactgactgttaggtttatttccatttcagagatgatggattcattctgaatggatgaaatactatatattttctaattgttcattcctggtttacaggaatgccatttattctgaataatgataggtacccagagatcttattgtattttgttagcttataaaacctactggaatttctgtgtagacaatcttatcgtctgtgaataacgacagttttcttcctattttccaatacttactgtttttctttttcgttttctttttttcattcttactcttatttgttttattggtcttattatctagtactagtacaacagtacatagaaatgatagtaaacacatttgcctcattcattatttgttttttattttttaaattgacagacaaaatagtatgtatttatttcattcattattttaagtgttaaaatatttttaatgtttcaccactaaatgtttcctgcgggtctctaatatattaagaaggttgtttcttattcctagttttacgagtttttgtcatgaatcatatataattcatgcttttccccttacatcacaacaaattttttcttttagtctattaatatggttaattatattaatagatttcctaatgttaaaaccatctttccattcataggataaagccaacatgttcaggatgttttcaatttggtatttttcacatggatttatttagctaattatttatttatttataatttctgcatctatgttttaggtgaaactgtcctttagttttcctttctcatattatatctgcctggtaatatagtatcaaagttacactagccccataaaatgaactcacaactttttttttccattttctacaacaatttatgtaagatagggttatctctttcttgaagttgtggtagaacttgcctacaaaattatccagacttgttttgtgatttctgcttgtgggagagaagcagtggaaaatggagatttttaactttgaattcaattattttaacgattatgggtttactcagatcttctccttcttaagtgagagttttaacctacatttttctagcatattatctatatcatgagggtttttaaatttattggtataaagctgcaatttaaaaatagattttttaatctgttacaagttttccctattcattctttttttgttcctgattaaacatataaaatagttatttataagtctttttaaagaattagtttatggatatgtcaatcttccactcttttgcctttattttctattaaattaatttttgctcttacccttattatttccttctaatattttatttttctttccctaacttcttgatttagatgtttagttctttaattttcaataattttgtatttcttctaccagatactctggtatcactggattaggactcatttttaatgtgaaatcctcagctttggagagagattgtttcctacttcacagagtagtataaattcagaccccatctgcagatagcagtcaggcctgagaatctaacttctatggggagatgttttcctccagctgagaaaccaggaagaagctgttaagttttgtctgtcttccaatgctgttgggctgttgggcatattatttttctggtccaccttttctctgaggaaaactggaaaagaattccaaactcaaaacttcattatgtctctgctcaaatatcaactaatcagaaaatatttttctgaataacttatctaaatagtatcctcatgattctcttattttatttccccaaataatatttaccccaactggtgtattacctatttgattatttgtggttgtctgtaaccttaccacccccattagaatttaagctccatgagagccggggatttatttcattgaatatttgctcagtcattaagcaggactcctcattttattagccagacatcttttaaagcaaaagcaaagactttagcaaaaatcaaaatggaacatagatattgctttcctttgaactatggcacttaaccattataaattattctcagaagacatatatttatatgtgtgaatataccatagaacaaaagtactccaaacacatatgcacagttaaaaaaattatgcaatgaatactcatgtaagtatacctgagatcaagaaacagaacactgccagaaccacagaatcccctgctgtgtgttcggctctccttacacaacttctcatcttccctagagctaaccattattctgatttctgaaaattcccttggttttcttcatggctgtaccaaacaatgtataacccccttaaccaatacagtttactttttcataccttcaaagatatttatattcataagattgaagtgttatagcatcagaatattataatttatattcaattttacataaaatctgttgctgcttagaaatcagtaatctgatttatattctaaatttcaataaattaccatctatgctttcagaaatctaataaaagggaacagttgtaagcataatactaaacaacacataatataaaagattttgaacttttgtacacataagtgctttttggttatatttttatcttccaaatcatgtagcatatgtcagctgaataggggcagaaaggaaaatgaaccacggattaaaatgtccccatagatcttacacaaaatactcagtcaatattagagaatcactaattaacttgatagaggaaaaaaatcagaggtataaaatacatttcagtctttggaaactatttttatgttattgcccatctagaaaactctttgaattagcagataaaagaaaagtacaattagaattgcaacttctccaaaatattagttatgctgtaatacatccattaagctatttaagaaaacatatatatgggagaaaatgcttataaataacactgtcaatctgaagggcatttgagaagacagaatttaacatatctatccatttaaaaaagaaactcaaacctttcaagttctttcttttgtcctccaaatgcaatcacagttctaattgctgccaagacctcttcagctactgctccagcttttgcatacgctaagagttctttatcagtaaatgaagatagtatctgtttaaaaatacaattttggatcatgaaaaaaacacgttaattttatcttttgtaaagtaaaaataaatgtatacataaatgctgcttatacattaatgcatgtgtagagcaaaatctgtcttttacttgcctttggtctgtattaacagccactgaagtaaacctctccctgaaaccagccactgatgcatgaacttgggtcccagagggtcctattatgaaagctggatcaattgcaatgggaaaagggctaacgttattgtacctagaatgctgaagtggtcaactacctaaataaagattacacatgacaggccaggtgtggtggctcacacttgtaatcctaacattttaggatgccaaagatgaataattgcttgagcccaggaattctagaccagcctgggcagcatggcaagaccccgcctctacaaaaaaattaaaaattagctaggtgtggtggcacatgcctattgtctcagctactcaggaggctgaggtgggaggatcgtttgagcctaggaggacgaggctgccgtgagcagtggttgtgccactgcagtccagcctgggcaacagagtgagaccctgttctccccacccctcccccaaaattacacaaaaccaatttattttaaaaattctgattaaatagaattatattctttcaataaaaaattcataggcacttgtggactcatttatgtaagtaacattgatctatcccttcttggcataaaaagctcaaagttgtttgggttttgacagtggatttctccctttcctgtgtgtgaaagtaaaaggagctatgacagctagaggaatgggtggatgaaggcaaatgaacattgattagttatgttctaagtgcagacattgtgctgcacgtacctagcctctttagtacccaaaataatattccattgattcactagacattcctgacttctcaaagcaatcttcctggggctgtcccaccatatttgcagaaccattcacggtaggaggtctgagatagggtggccagcgccatcccttaacaaacatctgtagaatagaggaggctcatacaacatgctttaggaatgtttttctgctccttctgaaacctcatggtgccacaacaattgccacaatggagacaaccaaaaataggaagatcacttcaaagtgatactttaaagaaatactttaaagttaggagtgtttaaaaatgttattttaatttattattaatatatcaaacaccacaatgaattctacaaatctagctcccttttccttctatgaccttccatcattataagcagacaaaagtatggttgaatcttcattaagtgttgtgtttttcaggagatcatgtctgtgaaaagaaaaaaaaaaaaaaaaagaccctctaacctatcctattatcaaggatatgaaaaggccaggtgtgatgactcacacctatagtcccaggactttggggtgacaagtgggagaatcacttgaggccaagagttcacgaccagcctgggcaacacatagaaaccccatctctacaaaaaaattaaaaactagctggacatggtagtacacaacacagtcatgatgcagaacaattcagtcacaaggatcccatcagagaatattatgaatgcttctgtgcacataaactagaaaatctagaataaatggataaattactgaacacatacatcctcccaagactgaaccaggaagaaataaaatccctgaacagaccaataaagagttctgaaattgaggcagtaataatagcttaccaccccctaaaaaagcccaggaccagatgaattcatggctgaattctgccaaatgtaaaaagaagagctgataccattcctactgaaaatgttccaaaaaatttaggtggagggactcctctctgacccattctatgaggccagaataatcctgataccaaaacctggcagagatacaacaacaaaaaaactttgggccagtatccttgatgaacaaatatgatacaaatatcctcagcaaaatcctggcaaactgaattcagcagcacatcaaaaagcttatctaccatgatcaagtaggctttatcctcaggatgcaagtttggctcaacagatgtaaatcaataaatgtgattcatcacataaacaaaagcacttgcttatctcaatagatgcaaaaagtctttcaataaaatgcaacatccactcatgatcaaaactctcaacaaacaaggtattaaaggaacacacctcaaaataataaaagccatctatgacaaacttacagctaacattatactgaatgggcaaaagctggaagcattccccttgaaaactggcacaaaacaaggatggaatcaacctaaatgcccatcaatgatagactggataaaaaaaaaatgtggtacatagacaccatggaatactatgcagccataaaaaaaatgagatcatgtcctttgcagggacatggatggagctggaggccattatgcttagcaaactaactcaggaacagaaaactaaatactgcatgttctcacttataagtgggagctaaatgatgagaacacatggatacatagaggggaacaacacacactggggcctattagagggtggagagtgggaggagggagacagtcattaaaaataactaatgggtactaggcttaatacttgggtaatgaaataatctgtataacaaatgcccatgacacaagtttcctatggaacagacctgcacttacacccctgaacttaaaataaaagttttaaaaagttaaaataaaataaacctgccttactctagccggcagttgttccattgaagtttagcatgatagtattggtctacttttgtgagctgtggttccaggagcggtttaatattcagagtgtttgtagtattattttggtcggcttgatttatgtgaagcttctggggctcccactggcccctgcttctgctgcttgagggagtgaaagtggtttttcaagatcagactgccaggtcgggaagagtgtggtggtttcctgtaccaatgccctctagtggcccagtgtctctgggcgctgggaagacagtcttgggcacaaagtacaaaagaggcttcctgggccaggtcacttgct

SEQ ID NO: 674 - DNA, 765 bp, Homo sapiens
aaattgatctgttagaagccaagtattgacagctattcgaagagtgggcacaaaccagataatattaagggaaatttggaattcagaaatgttcacttcagttacccatctcgaaaagaagttaaggtacagtgataaatgattaatcaacaattaatctattgaatgaagagtttctgatgttttcttgtagagattataaaaaagtgcatgtatatttaaacctagtgaacagtcagttcctatatcctgtgtctgtgaattgccttgaagtttttttctcacggtcctggtagatcttgaagggcctgaacctgaaggtgcagagtgggcagacggtggccctggttggaaacagtggctgtgggaagagcacaacagtccagctgatgcagaggctctatgaccccacagaggggatggtgagatgacccatgcgagctagactgcggtgatcagcagtcacattcacatctttctgatgttgccctttcaattacaaatgtatgaaagtcacacttactttttattccaggtcagtgttgatggacaggatattaggaccataaatgtaaggtttctacgggaaatcattggtgtggtgagtcaggaacctgtattgtttgccaccacgatagctgaaaacattcgctatggccgtgaaaatgtcaccatggatgagattgagaaagctgtcaaggaagccaatgcctatgactttatcatgaaactgcctcatgtaagttgtccttgccctttgccctt

SEQ ID NO: 675 - DNA, 247 bp, Homo sapiens
gatctgtgaactcttgttttcagctgcttgatggcaaagaaataaagcgactgaatgttcagtggctccgagcacacctgggcatcgtgtcccaggagcccatcctgtttgactgcagcattgctgagaacattgcctatggagacaacagccgggtggtgtcacaggaagagatcgtgagggcagcaaaggaggccaacatacatgccttcatcgagtcactgcctaatgtaagtctctcttcaaa

SEQ ID NO: 676 - protein, 533 aa, Homo sapiens
MAVESQGGRPLVLGLLLCVLGPVVSHAGKILLIPVDGSHWLSMLGAIQQLQQRGHEIVVLAPDASLYIRDGAFYTLKTYPVPFQREDVKESFVSLGHNVFENDSFLQRVIKTYKKIKKDSAMLLSGCSHLLHNKELMASLAESSFDVMLTDPFLPCSPIVAQYLSLPTVFFLHALPCSLEFEATQCPNPFSYVPRPLSSHSDHMTFLQRVKNMLIAFSQNFLCDVVYSPYATLASEFLQREVTVQDLLSSASVWLFRSDFVKDYPRPIMPNMVFVGGINCLHQNPLSQEFEAYINASGEHGIVVFSLGSMVSEIPEKKAMAIADALGKIPQTVLWRYTGTRPSNLANNTILVKWLPQNDLLGHPMTRAFITHAGSHGVYESICNGVPMVMMPLFGDQMDNAKRMETKGAGVTLNVLEMTSEDLENALKAVINDKSYKENIMRLSSLHKDRPVEPLDLAVFWVEFVMRHKGAPHLRPAAHDLTWYQYHSLDVIGFLLAVVLTVAFITFKCCAYGYRKCLGKKGRVKKAHKSKTH

SEQ ID NO: 677 - protein, 1280 aa, Homo sapiens
MDLEGDRNGGAKKKNFFKLNNKSEKDKKEKKPTVSVFSMFRYSNWLDKLYMVVGTLAAIIHGAGLPLMMLVFGEMTDIFANAGNLEDLMSNITNRSDINDTGFFMNLEEDMTRYAYYYSGIGAGVLVAAYIQVSFWCLAAGRQIHKIRKQFFHAIMRQEIGWFDVHDVGELNTRLTDDVSKINEGIGDKIGMFFQSMATFFTGFIVGFTRGWKLTLVILAISPVLGLSAAVWAKILSSFTDKELLAYAKAGAVAEEVLAAIRTVIAFGGQKKELERYNKNLEEAKRIGIKKAITANISIGAAFLLIYASYALAFWYGTTLVLSGEYSIGQVLTVFFSVLIGAFSVGQASPSIEAFANARGAAYEIFKIIDNKPSIDSYSKSGHKPDNIKGNLEFRNVHFSYPSRKEVKILKGLNLKVQSGQTVALVGNSGCGKSTTVQLMQRLYDPTEGMVSVDGQDIRTINVRFLREIIGVVSQEPVLFATTIAENIRYGRENVTMDEIEKAVKEANAYDFIMKLPHKFDTLVGERGAQLSGGQKQRIAIARALVRNPKILLLDEATSALDTESEAVVQVALDKARKGRTTIVIAHRLSTVRNADVIAGFDDGVIVEKGNHDELMKEKGIYFKLVTMQTAGNEVELENAADESKSEIDALEMSSNDSRSSLIRKRSTRRSVRGSQAQDRKLSTKEALDESIPPVSFWRIMKLNLTEWPYFVVGVFCAIINGGLQPAFAIIFSKIIGVFTRIDDPETKRQNSNLFSLLFLALGIISFITFFLQGFTFGKAGEILTKRLRYMVFRSMLRQDVSWFDDPKNTTGALTTRLANDAAQVKGAIGSRLAVITQNIANLGTGIIISFIYGWQLTLLLLAIVPIIAIAGVVEMKMLSGQALKDKKELEGAGKIATEAIENFRTVVSLTQEQKFEHMYAQSLQVPYRNSLRKAHIFGITFSFTQAMMYFSYAGCFRFGAYLVAHKLMSFEDVLLVFSAVVFGAMAVGQVSSFAPDYAKAKISAAHIIMIIEKTPLIDSYSTEGLMPNTLEGNVTFGEVVFNYPTRPDIPVLQGLSLEVKKGQTLALVGSSGCGKSTVVQLLERFYDPLAGKVLLDGKEIKRLNVQWLRAHLGIVSQEPILFDCSIAENIAYGDNSRVVSQEEIVRAAKEANIHAFIESLPNKYSTKVGDKGTQLSGGQKQRIAIARALVRQPHILLLDEATSALDTESEKVVQEALDKAREGRTCIVIAHRLSTIQNADLIVVFQNGRVKEHGTHQQLLAQKGIYFSMVSVQAGTKRQ

SEQ ID NO: 678 - protein, 1531 aa, Homo sapiens
MALRGFCSADGSDPLWDWNVTWNTSNPDFTKCFQNTVLVWVPCFYLWACFPFYFLYLSRHDRGYIQMTPLNKTKTALGFLLWIVCWADLFYSFWERSRGIFLAPVFLVSPTLLGITTLLATFLIQLERRKGVQSSGIMLTFWLVALVCALAILRSKIMTALKEDAQVDLFRDITFYVYFSLLLIQLVLSCFSDRSPLFSETIHDPNPCPESSASFLSRITFWWITGLIVRGYRQPLEGSDLWSLNKEDTSEQVVPVLVKNWKKECAKTRKQPVKVVYSSKDPAQPKESSKVDANEEVEALIVKSPQKEWNPSLFKVLYKTFGPYFLMSFFFKAIHDLMMFSGPQILKLLIKFVNDTKAPDWQGYFYTVLLFVTACLQTLVLHQYFHICFVSGMRIKTAVIGAVYRKALVITNSARKSSTVGEIVNLMSVDAQRFMDLATYINMIWSAPLQVILALYLLWLNLGPSVLAGVAVMVLMVPVNAVMAMKTKTYQVAHMKSKDNRIKLMNEILNGIKVLKLYAWELAFKDKVLAIRQEELKVLKKSAYLSAVGTFTWVCTPFLVALCTFAVYVTIDENNILDAQTAFVSLALFNILRFPLNILPMVISSIVQASVSLKRLRIFLSHEELEPDSIERRPVKDGGGTNSITVRNATFTWARSDPPTLNGITFSIPEGALVAVVGQVGCGKSSLLSALLAEMDKVEGHVAIKGSVAYVPQQAWIQNDSLRENILFGCQLEEPYYRSVIQACALLPDLEILPSGDRTEIGEKGVNLSGGQKQRVSLARAVYSNADIYLFDDPLSAVDAHVGKHIFENVIGPKGMLKNKTRILVTHSMSYLPQVDVIIVMSGGKISEMGSYQELLARDGAFAEFLRTYASTEQEQDAEENGVTGVSGPGKEAKQMENGMLVTDSAGKQLQRQLSSSSSYSGDISRHHNSTAELQKAEAKKEETWKLMEADKAQTGQVKLSVYWDYMKAIGLFISFLSIFLFMCNHVSALASNYWLSLWTDDPIVNGTQEHTKVRLSVYGALGISQGIAVFGYSMAVSIGGILASRCLHVDLLHSILRSPMSFFERTPSGNLVNRFSKELDTVDSMIPEVIKMFMGSLFNVIGACIVILLATPIAAIIIPPLGLIYFFVQRFYVASSRQLKRLESVSRSPVYSHFNETLLGVSVIRAFEEQERFIHQSDLKVDENQKAYYPSIVANRWLAVRLECVGNCIVLFAALFAVISRHSLSAGLVGLSVSYSLQVTTYLNWLVRMSSEMETNIVAVERLKEYSETEKEAPWQIQETAPPSSWPQVGRVEFRNYCLRYREDLDFVLRHINVTINGGEKVGIVGRTGAGKSSLTLGLFRINESAEGEIIIDGINIAKIGLHDLRFKITIIPQDPVLFSGSLRMNLDPFSQYSDEEVWTSLELAHLKDFVSALPDKLDHECAEGGENLSVGQRQLVCLARALLRKTKILVLDEATAAVDLETDDLIQSTIRTQFEDCTVLTIAHRLNTIMDYTRVIVLDKGEIQEYGAPSDLLQQRGLFYSMAKDAGLV

SEQ ID NO: 679 - protein, 765 aa, Homo sapiens
MSGDHLHNDSQIEADFRLNDSHKHKDKHKDREHRHKEHKKEKDREKSKHSNSEHKDSEKKHKEKEKTKHKDGSSEKHKDKHKDRDKEKRKEEKVRASGDAKIKKEKENGFSSPPQIKDEPEDDGYFVPPKEDIKPLKRPRDEDDADYKPKKIKTEDTKKEKKRKLEEEEDGKLKKPKNKDKDKKVPEPDNKKKKPKKEEEQKWKWWEEERYPEGIKWKFLEHKGPVFAPPYEPLPENVKFYYDGKVMKLSPKAEEVATFFAKMLDHEYTTKEIFRKNFFKDWRKEMTNEEKNIITNLSKCDFTQMSQYFKAQTEARKQMSKEEKLKIKEENEKLLKEYGFCIMDNHKERIANFKIEPPGLFRGRGNHPKMGMLKRRIMPEDIIINCSKDAKVPSPPPGHKWKEVRHDNKVTWLVSWTENIQGSIKYIMLNPSSRIKGEKDWQKYETARRLKKCVDKIRNQYREDWKSKEMKVRQRAVALYFIDKLALRAGNEKEEGETADTVGCCSLRVEHINLHPELDGQEYVVEFDFLGKDSIRYYNKVPVEKRVFKNLQLFMENKQPEDDLFDRLNTGILNKHLQDLMEGLTAKVFRTYNASITLQQQLKELTAPDENIPAKILSYNRANRAVAILCNHQRAPPKTFEKSMMNLQTKIDAKKEQLADARRDLKSAKADAKVMKDAKTKKVVESKKKAVQRLEEQLMKLEVQATDREENKQIALGTSKLNYLDPRITVAWCKKWGVPIEKIYNKTQREKFAWAIDMADEDYEF

SEQ ID NO: 680 - DNA, 3740 bp, Homo sapiens
caaatgcgaacttaggctgttacacaactgctggggtctgttctcgccgcccgcccggcagtcaggcagcgtcgccgccgtggtagcagcctcagccgtttctggagtctcgggcccacagtcaccgccgcttacctgcgcctcctcgagcctccggagtccccgtcccgcccgcacaaggccggtcgccgtctgcgtctcccccacgccgcctcgcctgccgccgcgctcgtccctccgggccgacatgagtggggaccacctccacaacgattcccagatcgaagcggatttccgattgaatgattctcataaacacaaagataaacacaaagatcgagaacaccggcacaaagaacacaagaaggagaaggaccgggaaaagtccaagcatagcaacagtgaacataaagattctgaaaagaaacacaaagagaaggagaagaccaaacacaaagatggaagctcagaaaagcataaagacaaacataaagacagagacaaggaaaaacgaaaagaggaaaaggttcgagcctctggggatgcaaaaataaagaaggagaaggaaaatggcttctctagtccaccacaaattaaagatgaacctgaagatgatggctattttgttcctcctaaagaggatataaagccattaaagagacctcgagatgaggatgatgctgattataaacctaagaaaattaaaacagaagataccaagaaggagaagaaaagaaaactagaagaagaagaggatggtaaattgaaaaaacccaagaataaagataaagataaaaaagttcctgagccagataacaagaaaaagaagccgaagaaagaagaggaacagaagtggaaatggtgggaagaagagcgctatcctgaaggcatcaagtggaaattcctagaacataaaggtccagtatttgccccaccatatgagcctcttccagagaatgtcaagttttattatgatggtaaagtcatgaagctgagccccaaagcagaggaagtagctacgttctttgcaaaaatgctcgaccatgaatatactaccaaggaaatatttaggaaaaatttctttaaagactggagaaaggaaatgactaatgaagagaagaatattatcaccaacctaagcaaatgtgattttacccagatgagccagtatttcaaagcccagacggaagctcggaaacagatgagcaaggaagagaaactgaaaatcaaagaggagaatgaaaaattactgaaagaatatggattctgtattatggataaccacaaagagaggattgctaacttcaagatagagcctcctggacttttccgtggccgcggcaaccaccccaagatgggcatgctgaagagacgaatcatgcccgaggatataatcatcaactgtagcaaagatgccaaggttccttctcctcctccaggacataagtggaaagaagtccggcatgataacaaggttacttggctggtttcctggacagagaacatccaaggttccattaaatacatcatgcttaaccctagttcacgaatcaagggtgagaaggactggcagaaatacgagactgctcggcggctgaaaaaatgtgtggacaagatccggaaccagtatcgagaagactggaagtccaaagagatgaaagtccggcagagagctgtagccctgtacttcatcgacaagcttgctctgagagcaggcaatgaaaaggaggaaggagaaacagcggacactgtgggctgctgctcacttcgtgtggagcacatcaatctacacccagagttggatggtcaggaatatgtggtagagtttgacttcctcgggaaggactccatcagatactataacaaggtccctgttgagaaacgagtttttaagaacctacaactatttatggagaacaagcagcccgaggatgatctttttgatagactcaatactggtattctgaataagcatcttcaggatctcatggagggcttgacagccaaggtattccgtacatacaatgcctccatcacgctacagcagcagctaaaagaactgacagccccggatgagaacatcccagcgaagatcctttcttataaccgtgccaatcgagctgttgcaattctttgtaaccatcagagggcaccaccaaaaacttttgagaagtctatgatgaacttgcaaactaagattgatgccaagaaggaacagctagcagatgcccggagagacctgaaaagtgctaaggctgatgccaaggtcatgaaggatgcaaagacgaagaaggtagtagagtcaaagaagaaggctgttcagagactggaggaacagttgatgaagctggaagttcaagccacagaccgagaggaaaataaacagattgccctgggaacctccaaactcaattatctggaccctaggatcacagtggcttggtgcaagaagtggggtgtcccaattgagaagatttacaacaaaacccagcgggagaagtttgcctgggccattgacatggctgatgaagactatgagttttagccagtctcaagaggcagagttctgtgaagaggaacagtgtggtttgggaaagatggataaactgagcctcacttgccctcgtgcctgggggagagaggcagcaagtcttaacaaaccaacatctttgcgaaaagataaacctggagatattataagggagagctgagccagttgtcctatggacaacttatttaaaaatatttcagatatcaaaattctagctgtatgatttgttttgaattttgtttttattttcaagagggcaagtggatgggaatttgtcagcgttctaccaggcaaattcactgtttcactgaaatgtttggattctcttagctactgtatgcaaagtccgattatattggtgcgtttttacagttagggttttgcaataacttctatattttaatagaaataaattcctaaactcccttccctctctcccatttcaggaatttaaaattaagtagaacaaaaaacccagcgcacctgttagagtcgtcactctctattgtcatggggatcaattttcattaaacttgaagcagtcgtggctttggcagtgttttggttcagacacctgttcacagaaaaagcatgatgggaaaatatttcctgacttgagtgttcctttttaaatgtgaattttatttctttttaattattttaaaatatttaaacctttttcttgatcttaaagatcgtgtagattggggttggggagggatgaagggcgagtgaatctaaggataatgaaataatcagtgactgaaaccattttcccatcatcctttgttctgagcattcgctgtaccctttaagatatccatctttttctttttaaccctaatctttcacttgaaagattttattgtataaaaagtttcacaggtcaataaacttagaggaaaatgagtatttggtccaaaaaaaggaaaaataatcaagattttagggcttttattttttcttttgtaattgtgtaaaaaatggaaaaaaacataaaaagcagaattttaatgtgaagacattttttgctataatcattagttttagaggcattgttagtttagtgtgtgtgcagagtccatttcccacatctttcctcaagtatcttctatttttatcatgaattcccttttaatcaactgtaggttatttaaaaataaattccatcaacttaatggaaacttaa

SEQ ID NO: 681 - DNA, 128993 bp, Homo sapiens
  misc_feature (1)..(128993): n=a, c, g or t
aagcttcagtagccaattcgatcaagtggaagaaagggtatcagtgattgaagatcaaatgaatgaaatgaaacaagaagaggagtttagagaaaaaagaataaaaagaaacaagcaaagcctccaagaaatatgggactatgtgaaaagaccaaatctatgtgtgattggtgtacctgaaagtgacaggattaatggaaccaagttggaaaacactctgcaggatattatccaggagaacttccccaatctagcaaggcaggccaacattcaaattcaggaaatacagagaacaccacaaagatactcctcgagaacagcaactccaagaaacataattgtcagattcgccaaagttgaaatgaaggaaaaaatgttaagagcatgcagagagaaaggtcaggttacccacaaagggaagcccatcagactaacagctgatctctcggcagaaactctacaagccagaagagagagggggccaatattcaacattcttaaagaaaagaattttcaacccagaatttcacatccagccaaactaagcttcataagcgaaggagaaataaaatactttacagacaagcaaatgctgagagattttgttaccaccaggcctgccctaaaagaggtcctgaaggaagcactaaacgtggaaaggaacagccagtaccagtcactgcaaaaacataccaaattgtaaagaccatcaaggctaggaagaaactgcatcaactaatgagcaaaataaccagctaaaatcataatgacaggatcaaatccacacataactatattaaccttaaatttaaatgggctaaatgctccaattaaaagacacagactggcaaactggataaagagtcaagacccatcagtgtgctgtattcaggaaacccatctcacgtgcagagacacacataggctcaaaagaaagggatggaggaagatctaccaagcaaatggaaaacaaaaaaaggcagggattgcaatcctagtctctgataaaacagaatttaaaccaacaaagatcaaaagagacaaagaaggccattacataatggtaaacggatcaattcaacaagaagaactaactatcctaaatatatatattcacccaatacaggagcaccaagattcataaagcaagtccttagatacctacaaagagactcccacacaataataatgggagactttaagaccccactatcagcattagacagatcaacgagacagaagttaacaaggatatccaggaattgaactcagctctgcaccaagtggacctaatagacatctacagaactctccaccccaaatcaacagaatatacattcttctcagcaccacactgcacttactccaaaattgaccacgtagttggaagtaaagcactcctcagcaaatgtaaaagaacagaaattataacaaactgtgtctcagaccacagtgcaatcaaactagaactcaggattaagaaactcactcaaaaccgctcaactacatggaaactgaacaacctgctcctgaacgactactgggcacataacgaaatgaaggcagaaataaagatgttctttgaaaccaatgagaacaaagacacaacataccagaatctctgggacacatttaaagcagtgggtagagggaaattaatagcactaaatgcccacaagagaaagcaggaaaggtgtaaaattgacaccctaacatcacaattaaaagaactagagaagcatgagcaaacacattcaaaagctagcagaaggcaagaaataactaagatcagagcagaactgaaggagatagagacataaaaaacccttcaaaaagtcaatgaatccaggagctggttttttgaaaagatcaacaaaattgattgactgctagcaagaccaataaagaagaaaagagagaagaatcaaatagacgcaataaaaaatgataaaggggatatcaccactgatatcacagaaatacaaactaccatcagagaatactgtaaacacccctacataaataaactagaaaatctagaagaaatggataaattcctcaacacatacaccctcccaagactaaaccaggaagaagttgaatctctgaatagaccaataacgggctctgaaattaatagcttaccaaccaaaaaaagtccaggaccagacagaatcacagccgaattctaccagaggtacaaggaggaactggtaccattccttctgaaactattccaatcaatagaaaaagagggaatcctccctaactcattttatgaggccagcatcatcctgataccaaagcctggcagagtcacaacaaaaaaagagaattttagaccaatatccctgacgaacatcaatgcaaaaatcctcaataaaatactggcaaaccgtgggcgcggtggctcacgcctataatcgcagcactttgggaggctgaggcgggcggatcacaaggtcaagagatcaagaccatcctggctaacatggtgaaaccctgtctctactaaaaatacaaaaactagccaggcgtggtggtggggacctgtagtctcagctactcgagaggctgaggcaggagaatggcgtgaacccgggaggcgcagcttgcagtgagcccagatagcgccactacagtccggcctgggcgaaacagcgcaactccgtctcaaaaaataaataaataaaataaaataaaataaaataaaataaaataaaatactggcaaaccgaatccagcagcacatcaaaaagcttatccaccatgatcaagtgggcttcacccctgggatgcaaggctggttcaacatacacaaatcaataaacgtaatacagcatataaacagaaccaaagaaaaaaaccacattattatctcaatagatgcagaaaaggcctttgacaaaattcaacagccattcatgctaaaaactctcaataaattaggtattgatgggaggtatctaaacataataagagctatttatgacaaacccatagccaatatcatactgaatgggaaaaactggaagcattccctttgaaaattggcacaagacaggatgccctctctcaccactcctattcaacatagtgttggaagttctggccagggcaatcaggcagaagaaagaaagaaagggtattcaattaggaaaagaggaagtaaaactgtccctgtttgcagatgacatgactgtatatctagaaaaccccattgtctcagcccaaagcctccttaagctgataagcaacttcagcaaagtctcaggatacaaaatcaatgtgcaaaaatcacaagcattcttatacatcaataacagacagagagccaaatcatgagtgaactcccattcacaattgcttcaaagagaataaaatacctaggaatccaacttacaagggatgtgaaggacctcttcaaggagaactacaaaccactgctcaacgaaataaaagaggacacaaacaaatggaagaacattccatgctcatggataggaagaatcaatatcgtgaaaatggccatactgcccaaggtaatttatagattcaatgccatccccatcaagctaccaatgactttcttcatagaattggaaaaaactactttaaagttaatatggaaccaaaaaagagcctgcattggcaagtcaatcctaagctaaaagaacaaagctggaggcatcatgctacctgacttcaaactatactacaaggctacagtaaccaaaacagcatggtactggtaccaaaacagagatatagaccaatggaacagaacagagccctcagaaataataccatacatctacaactatctgatctttgacaaacctgacaaaaacaagaaatgggaaaaggattccctatttaacaaatggtgctgggaaaactggctagccatatgtagaaagctgaaactggatcccttccttacaccttatacaaacattaattcaagatggattaaagacttacatgttagacctaaaaccataaaaaccctagaagaaaacctaggcaataccattcaggacataggcatggtcaaggagttcatgtctaaaacaccaaaagcaaaggcaacaaaagccaaaattgacaaaaatgggatctaattaaactaaagagcttctgcacagcaaaagaaactatcattagagtgaactggcaacctacagaatgggagaaaatttttgcaatctactcatctgacaaagggctagtatccagaatctacaaagaactcaaacaaatttacaagaaaaaaacaaccccaccaacaagtgggtgaaggatatgaacagacactcctcaaaagaagacatttatgcagccaatagacacatgaaaaaatgctcatgatcactggccatcagagaaatgcaaatcaaaaccacaatgagataccatctcacaccagttagaatggcaatcattaaaaagtcaggaaacaacaggtgctggagaggatgtggagaaataggaacacttttacactattggtgggactgtaaactagttcaaccattgtggaagacagtgtggtgattcctcaaggatctagaactagaaatatcatttgacccagccatcccattactaggtatatacccaaaggaatataaatcatgctgctatacagacacatgcacaagtatgtttattgcagcactattcacaatagcaaagacttggaaccaacccaaatgtccaacaatgatagactggattaagaaaatgtggcacatatacaccatggaatactatgcagccataaaaaatgatgagttcatgtcctttgtagggacatggatgaagctggaaaccatcctcagcaaactatcgcaaggacaaaaaaccaaacacctcatgttctcactcacaggtgggaactgaacaatgagaacacttggacacaggaaggggaacatcacacaccggggcctattgtggggtggggggatgggggagggatagcattaggagatatacctaatgtaaatgacaagttaatgggtgcagcacaccaacatggcacatgtatacatatgtaacaaacctgcacgttatgcacatgtaccctagaacttaaagtataatttaaacaaatttaaaaaaataaagaaaaaaaaacttctaaaaaaataaataaaaccagctttcatttgataaacaatttattctccaaagtgctaatttttttttaaattgcccttactgaggctttttaaacaaataaaaaaagaggagagaagacaatgaataggggcttttggttacatgagaagtatgcagcagtgtttgagagtgtggatgttttggtgtctttttatccatttaattactaagttggatttcagctgacatgacacttaattctaacttctttgctaccaaataatggctgtcacagtttgaaacacgtcatatttaccaaaaatgggcaaatgctttcttgagctgcctctgtaagacatatttcaaatgaaaaccagatgaggagacttcttccaaaaatattgtcttgtcttgtaccaacagaaaagcaccgaaaactgttttaagcataatcagaattcctaatagttaccccctatttagccaattttttggaaaccaaatgtgaatgtagattccttaaattaaaatttatgtacttaacaattactttcttgaaatgcaagcttattttaagctaaatttggggtgggggtctgtgaagcaaatgcagaaatgcattttcttgaaattgttgagtttgcattgtgctactaacacaattcccattttcactttccttgcacaccagttagctctgtccggtgtcatcgccagcctgtctctactttttaaaaaatcatccatcttaagaatgtgggtcattgactataataagccaaacttatacagcacaggtgcagcaaggacaatttattgctgtctgcagacagttttttgttgtcgttgtttttgagacagggtcttgctctgccacccaggctggagtgcagtggtgtgatcataactcactgcagcctcagactcctaagaccctcctgcctcagcctcccaagtagctgggactacaggttcatgccatgacatatgctattttttaagatttttatttttattattttgtagagatgagatctcactatgttgtccaggctggtctcaaactcttgtgctcaagcaaccctcccacctcagtctcccaaagtgctgggattacaagtatgagtcagctcgcctagctagacaatcttaaagtatttgctttaaaggtaattgattcaatacctcaaatttgaataaaaggtaggattattcacatttaacatttcacagcttaccaatgttaatactccaatcattttcactgtcttcgtttttttccttttttgtttgctgtaaaaaatagaattgcttcaatttaaaactgttacaaaatgttttacaatcaattgaacataaatatgtttagttacaatattcaactattatattttcaaatataagagtgatgttcacaaaatgtcaaaattattcagttcaacaaacatagcaagcacaaaagtaactgtcgaaggtactacaaagatacatggatacataagaaatggtcgcctgccttacagagctcacatacacaggaaagataagtatgctaacagtgtcgctaagtcaattaagttatttgttttctaaaattaaaaaaaatcatgatttaaaattaggaatgtctattcttctgaaggattgtggagagtggtgtcaggcaatcttgttggtgatacattcaaagtacatctagaatttaaccacttatcaccagtttcattgctgtcaccagtagggcagcctcctgcctagtctctccacttccacctatgccgcttcagtctatcttcaactagcagtcagagtaattatttcaaaatgccaagccatacactacttctttgctcaaaaacctacaatggctttcctttttcttacaataaaagccaaaatccttgcattaacctctgaggtcctacacgatctgtttgcttatttcctctctgaccacatccctactcccaaacctgcttactctgctccaaccagcctggactctctgctgttccatgaactcaccaaacatgtacctgactcagggtctttgcattgccagttaccttttccgggaatgctctccccttagatacccacacagctgtctcctctcatttctttcaagtctttgctcaaatattacctttaaaataagatctaccctaaccaccctacttaaaattacaaagtactccccttttgtactcctgatccccttaacctggattaatgcttttttccatggcgttaattaccttctaacattggctgtggtttacttatttagtatgtacattatttatgtctgtcctccgtactataatataaactctatgagggagtgtgtgtgtgtgtgtgtgtatgatgatttatatatatatgatgatttttacataaatatgatgcatttatccaggtaaatgataaagttttactcataagatgattccaaattatgtaaagtattgactaaaatcactggacaaacatctgccactaaatatgttcaaaagaatgtgccatgggcaatagcaacataattagaacaagaatataactaatttgattgaagcaggcttaacttcctttaaatatattatctttggtctgcttttataaaaattagtttcactacatttgatttcataatcatgtggtcttaacttattgttaactttctgtatttctcttttgagctgctttcttctttccagcagaagctgtgggcttcccctctgaggactttcctgggttctgaagtgttactacaccttttgtaggaatagctcctttgcacacgcatcaaatgttaagccagtgcaatacataaatagacttcttcatgaaaatgccatctattaatagactcacagtcaatccctgcctaaacagccagctgatgaaaaccatatttttctattgcgtgtgtaagtacttccattggaagtaacaccatctatcactttttcaattctacatggcaaaactaaattttctatgaaaaaatacaatggtgcttagaagaaatacagcaaggttactgcacaaccacattaacaggctaaaataatgcttcagtttaagcatcaggtaggcatgttttcagttagctaatcaagcccctagcagcttgaggacaaactacagagactgataaatttgtccctctgggtgatcacttgacacaggtcaattttttctgggtagcctggtatgaactcagagaccgtaatagcctcataaactatttcaggctaaaggcgaaaatgattcactattcccacagtgaaagaggaaacaaagacacacgccattgactgggaacttctgccccgctcataaagcctgtgaagtgagtttaacaagggccaggggaaccgagaaagacatgaaggcaaaggaagcgctgcttccccctaccacttgaacaaaactgattcggatgtacagaagttccccctccccacctatcctcccagaaaggagaaatacaaataagcctggcgatgagaggagggggaggggtaagacaaggaggaagagacataacaggggatgggcaggaggggagggagtttttgcttcactgcccttgttcaaaaagcacagccatcaacagcagatgtctgacaccctttaagtctgaacaatcagatgatgtatatgaaagtcatttgtaaaagtttcaagagttacgtaatacaatgaatgttatacaatgcagatattcattgaatcccccctgcacaaagggaagggagcacttttcaagacagccttttcttcctgaatctgttccaaaaggagcctcagtgacattctttgaggccacacaacacgtttgctccaaggtcagaaccggatgcaagacccttcaaagaagcctccaaaacaaaggtcttcaaaggcatcaaccgatttttacaacttctttccaagggtgaacttagtcctgctgattggcgtgtaacggaaaagccagtggctgctggggatgtacctgctgatgcccagttcaaagtcgccctccgcgctcgtggggcgccaggctgttccgttctttgccgcctcaagatccatctcagcctgaggagaaaccacagcctcagaaccaagtacaccctctccggcggcccggcgcacgagtcgcggggcccgggggcactgggtggaggtccggccactcccgccccgcgccccacgtcccgggtctcccttcgaggccagacgcgcccggacctctctcacctcgaacctcgcgcgtgtctggcagggctctggacgcgcgggcgctgcagcagaggggcctggactttgctcgccgcggcctcgcccccgcccccgcccccgccccccacgcgcgtccggcccgggaaacgcctaccgttgcagccagggcgagggccgcggcccgcgagagcagctcccgccgcccgcccagctctctccccaggctaggcgcgggccaggggcgcagcctgccgctcttgccgccggggcgcccggctggggccgccgcccaccctggcgacccgccagaaccagcttttgtttcatgataagaccgagatcaggctggagcctcgggtgccgagaaagcctcgcctgatgggccacccaagcccctgcagatgactgtcacaccccatgggcgctcagttttgtttttaaacccataggggagacagtttccggacgcccaacaatcacagggcggcccaggaccgagagagagcaatagactcgcctcttgcttccgcatccccagttctggtccaggtggcactgaacccaattatctccaaggacggcgagagtcagccagggccggcaggaaccatcacattatgctccttggggaggaggaacgctgttggtgccctcttagcacttaagagacacagagttttagggctagaggggtcttcagcgatcatctaattaaaaccccgtatgtttaacatatgaagaaacggatgcccagagaggtgaagtcctgcctgaggctgcatcggtggaaccagagtctaggggaagcctcctgagtcccagtccagtgccctggctcactgctctcatctaagacttctgtctgtattgaattgtctctgctcctaccacctatttgagtatgactttcttctttctgattaattcctccacactcttcccaaaaggaagtgtctaaaacggggagccataagtttcatggctttgaaaccggagactttcaaactcagagcttcacatcttattaactatgtgactttggacactgtgctcatttctctaggcctgtttccttatatgtaaaatgaggataaaaacatctcccttatcaggttattgcgaggaataaatgagttgaggataagggaattaagtactaggtaaaagcacctagtactatgcctaaaacatagtaggtgagcaacaaatacaactttccttccttctgatcaggtagcaggatgaccagtgggtccttgcacctgctatgtcctgttaacacaattgttagcccaaggcttgtctgagttctcagagaaccttaaagcagagcatggtataagtagagatgctgggtggaccctggtgtgaatctcacctttcccatgtaccagctgtctggccaggttatgtaattcttgactcagtcattggatctataaaataagggtgttattaggattagggatactgtgtgtaaagtgtcctgcacgtaggagacacctaataaatggtgactattattatagtaaaagttcaggcgaggccaaggaagaaagactggaacaggagccagcagcttcggcactcaccccttacttgtgctgtgcctctgcatcctgctctgcctgccacctggagctaaggtggaacttgacttgaaactgcatgctggagtagaaatgaatttagttgagtatttttcctcaaaatgttttctctccatatcagtctaccatgaccatgaggattctcttcttaaatcaacccaaattccttcccttcactggtctaacaggcggtcagatcattatttcaagatactctgagacggaagcagttggaattgtgtagtttgaaagaaggcttgtggtgactggaggacattattaaactcattagcacataaggagatgacagtttcttcagtctctaataaaagagaatttgataaagtaaatgcagatacttgaaggagtaggaaggttcagaacaaaaactaaagcaaataacatgtatgaggcaatgaggtgtatttgcctgtctgtctgtctgagccgattcacaaagttgtccctgcaagaagccatgcctatatggctgtgtttacttctttacctgtattacatccaattccaggagctccttttatatttatttgataacagtgcagtatcactgagaattccatcatttattcatcaactagaagttgaagacttacaatatttaaagcactatgataaactagatttctccattacactcaggctgtaagaaatctttactttccctttacagtagaatattgagatacttatgcattgatgtaaggctggaattaatgccctaccacgctatcttactttttctatttgccccattggttccatctttcttttttatcctcacttttgccttattttagatctgtttaatattatcatttagatttcctttctataagatgtattcttttattttctatttaataatgatctcctttctagggattatgacatgtatctttgactaatcattgtactttttcctcttccaggacaatgcaatgattttagaactcttaagtctcttttttattcacccctaacttttacattgccattgtcatgtactttaattttctctgtatattcatgactcttctgggaatattatttctttatgagttgatacttatttagctttatcaaaacatttatcattttcttgctttttgtttcttcctacatctcaaagctaccctcttggatcattttcctttcacctaatgagcactctttcatctactgtctctttcttgttttctttagtttgtgacaaattttctcagcttttttttcctgaaaatttatttcacttttatcttgaaaaattatcagttatttatgggtttgccttactaaataaatatcaaaactcattatcaaactatggtaattagagacatgtgttttggaatgagacagacaaagtaaaacagaatcaatatcttataactgatggaactagaattcgaatccagggagtatccttatccgctatgactagcagggaagtggagatggagaacatacgtcagatgtatcagagagttaaacacagtcattctttaatgcatccttcagtccactgatcttaccacctttttactgttcctcacctccttcatgtcttctctcttaactcagcctgaaaacacccacaaccctctagccctctctctttatcaggcttgcttagtaaaaccacaatcctggataattcaagttactgagctactgtgaacctacaccatgcagcagaacatgtctgaagaaaaatacaaagtcatcgggcttgcctcgccatgaacttacatggccctatactgtatacataatgtacttattatgtttattatttattgcccactctgtgggatgcaagacttatgagggcaaagattttgtaaaattcactatgtatcccaacgtttactgaccaatagtcataagatgttttcttagttcattcactcacctgcttttctaataattatttcatatcgtctgttttctcaaattctgttcttttacatcttcacattctgctaaattaccgtgcttatttcactgatgaagttgaagtgtttagaatggaactccataacctcctaccatgatatttttccacttaccagcatctgtaccaacactctgcctttgctgtttctgtaaatgaactattcatgcctctctttgcagccagtctttgtttgcatgttcatcctgtagatcccatcccctttcactttcacaaggagccattcttccctttctgtcctatatcatcaatttccccatgcctgctggatccctcctgtgagcttacatacatactgttatttcttccatcttgaaaaacaaacaaaaaacctctcttgaccacacttcccctgccagctaccatcatatttccctcttttcctttggagctaaactggttggcaaagtttattactttcttcaattcctgttgttctctctgaaacccactctaaacagaagtttgatctttccacactaccgaaactatttttataaaagtcactgataatctctgctttgctaagtccaaagatcaattctctgttcttattttacctgacaaattcaataatttgacagatttatcactctgtctttctgaatatatctttttcatatagattccaggacaccatatgtttctcggattttcctatgctttcctgatcactcttcctcagtctcctttgatgccttctctctctctctttttttcaactacttacctaacactggagtggtccaaggctcattccttggacttctcagtctattctcgccacttctgtcatgtcagtcagtcacacagctttaaataccatctgtatcgaataatttctaactttttgtttctagcctaaaattccctcttgcattcctgactcttaaacacaagtgcatctttgacattcctatctggatgtttaacagacatctcaagcttaacatgcctaacctgctcctgatcctttccccaggctgggccctccagtgaacttctgcatccagttggcagctccagacttatagttgtcaacaaaaacactggaatcatcctgcattcctctctttctttgacacaccataatcaatctgtcaggaaatcttgttgcctttactttcaaaatatattcagaatctgacctttgccctgcacctccagctctaccaccatcatgcaagccactatcatctccacctgattttctataatagcttgttaattgtctctctgcctctgtcctttcctcctcttccgcctttgtccattgtcaaaagcatggcctggatgattcttttgaaatgtgagtcacatcacatcactcttctcttcacatttctgtggtagcccccaattcactcagtcatggcctacaatgctgtgccctctccgtgacctctctgatctcatttttatttattttgtctttgcctaactccactccagccacactggcctcttggatattactcagacaagagaggcagcactccacctcagggtgtttgtactagttgttccccctgtccaaaattatcctccccaaaatactgacatggaggacactctcacctcctaaaaatctcttctcaattagaagttggatcttgtaccctcaggactctcagttcctcttatcctactttgattttcttttccacagcatttatcaccttctagtatactatatcattaaagaatttattatgcttattgtctcttgtcatcttagtagcacataagagccgtgagagtaaaaatattaatatgttttcatttcattcgctggaatatccaataattgctgcccacacttactatgtgcaaggacctgggctaaggttttaggataaaaagttttaggcatataaagaaggatttaaacaaggctaatgcaaaagttactcagattatatagtattttatgaatttacagagcctatcacacatatatatcatctcatttgattctcaaaacaaggagcatgttcaaggtaaacaagtgaggaactattattctcagtttagaggtggggatatcaaagtgaattttacacagctagtaaacaatggaattaggcttccagctctggccacgtgacttcagcttctcattctgtattcctattgaagaccactgttagacagaagccttacctgttgtatttctagtgcccacagcaccagtgggctcagtaaatgtgtattgaatagatcaatatttttgaactatagcataaaagggtttgtacaaaaagaatttcctataagtaagagtcaacagagaataacaaattccatctaccaaagtattttcaaattatattcaaatataaattaattagcaacaatttttcctaaagagggtgctatgatggactctattctctgtcctgttgacttatatcttgacaaatatgctctgtggtcttttcccccactatattgcatttgtggctatctaacaattctccaaattttcatgtctgaagatagtgaaaatttgactattctgtttgcacttggctgcacttaactactcttgaatcatttccaaacttttggtcactaatgttttttacttctgctcaaactaccttctcagagtttatagatcttaatttttcctgcctttacttccttcaacccatgttacatcttatacttctcccaaagtttttttttcttttttaaaaaacccttctcattgcttgactcagaaattttttgctttgcctttgacctttctcttaaaaatattatttccttttggtttcgttcttcttttgttcattataaaattcatctaattcggcccagcacacccaaaggcactcataaagatgttgaagacaagggtaatactgattcagctctctctctctctgttttccactaaactcttccttataccttcataaactagggtggacttgcaaaggtaccatgacaagaagtagttagaagaatttgctattaatcactatgttatatcatttctgccaacgtggattaatgggcacattgagagttccaaggtcacattgcctaatgaaattcttgtgttctgtgagagtaatgaaaaccactgggtggacagggagggctgcaaggtgccaaggccaacgatgaaatggataagcaagagtagggtcactaggcttaaggttattgacatttactaactcttaaagttattctaaagctaacgcttttcaaaataaaagaatgactaaaggaagttctctaaatagaaaattataaacaggagaaacttagaatatctagaataaagaacatggtcaagaaaaatattggtaaatacaagaaactttcctcttcctattgagttttctaaattattttttatgggtgaagcaaaaattatatcactgtctgatgtggttctaaatataagtaagggaaatacataagacaattacaagtgaatgagagagagtaaagggatataagggagataagatttctacacttcactcaaacaagtaaaatgatgaaaatagtaaagtatgataagttatttatatataatgcaatactcagaggaccactaaaaaatctacacaaatagatatagtcaagactaccacaggtagagaagaagggcagggcaagatggctgaatagaaggatctactgattgtccctctctacaagaacactaaatttaaacaactatctatacacaaaaagcaactttataaaagccaaaaatcagatgagcactcatagttcctagttttaacttcatatcgctgaaagaggcattgaagagggtaggaaagacagtcttgaattgctgatgccacccttcatcctcccagcagtggccacattgtgcggagagaaaagctatgtgtttgggagagggagagcacagagattgtgagactgtgcattgaactcagtgcttccctgtcacagtataaagcaaagctgggctgaactcagttgacacctgcccacagagggagcatttagatcaggcctagccagaggggaatcacccatcccagttgtcggaacttgagttccatcaagcttcatcactgtgggctaaaatgccttggggctctaaataaacttgaaagtcagtgtaggccacaaggactgcaactcctaggtgatttctagtgctaagctgagctcagagccagtggacttggggaggcacatgacctacggagacaccagctggggcagctaaggaaatggcttgcaccacccttcccccaaccccaggcagcatagctcatggctccaaaagagattccttccttctgcttgaggagaggaaagggaagagtaaagaggactttattttgcatcttggttaccagcttagccacagtaggataggggactggtcagagtcatgagactcacatcccaggccctagctcctggacatttctagacatacgctggacaagaagggaatctactgctttgaagggaaggaaccagtcctagcaggactcattacttgctgacctttgggccccgaataaccatcagtgatgcccagatagtacgccatggacatggaccttgggtaggactctgagatgtgctggctttaggtaagatccagcacattacccgctatggtggcggtggtgagagactctttgcttgagaaaagcaggtggaaaagtaaaggagactttgtattgcaccttaggtaccaattcggccacagggtcaaagcaccaagcaggctcttggaatccaggccttggctcttttatggcatttctggacccgccatgagcagagggtgcccactgccctaaagaatgagttccagaccgggcagcattcaccacaagctgattgaaaaacctttgtgccttaagtgaaccgtggcagtagcctggaagtactcccctgggcctgtggtggtgaaggccagggggcgaggctctcctgcctgtggaaaggggagggaagaatgtgtctagtggtttgagtgccaactaaactgcacaccaagtagatttctaaggattctgactccagtctctggctctcagactacacctctcaacctacccagggcctgggggaactcaccaccctgaagggaaggatacaaacgtggctagatttactaccagctgattatagagccccaaggtcttgagcacacattggtagccaggtagtggttacatcaggccttgagcaagatgcagtactgtgctgatttcaggtctgtcctagtgcagccccagtggtgtagccacagaggaacttgtgtcatcccaccccaagctccaggatgtccagcacagaaaaagagagagggagagagagagagagagaatttgtttgtttgggagaaagtaaaagaagacaacaagagtctctgcctggtaagaaattttctggatcttatccaagaccatcaaggcagtacctctataagtctgtaagaaaccacaatgttactgggcttagggtgctccctaatgcagatacagcttagatcaaaatacccaagtactttcaaacacctagaaaagccttctcaagaaagatgggtacaaacaagctcgggctgcaaagaccaaaataaatacctaacacttcaatgcccatatactgaccgatacctacaagtatcaataccatccaggaaaacatgacctcaccaaatgaactaaataagtcacctgggaacaatactgaagaaagagatatgtgacctgtcaggcagagaattcaaaatagctgttttgacatatagaccaatgaaacagaacagagacctcagaaataatatcgcacatctacaaccatctgatctttgacaaacctgacaacaacaagcaatgggggaaaggatctcctattcaataaatggtgctgggaaaactggctagccatatgcagaaaactgaaagtggactccttccttacaacttatacaaaagttaactcaagatggattaaagacttaaaacccaaaaccataaaacactagaagaaaacctaggcaataccattcaggacataggaatgggcaaagacttcatgatgaaaatgccaaaaggaattgcaacaaaagccaaaactgaccaatgggatctaattaaactaaagagctctgcacagcaaaagaaactatcatcagagttaacaggcaacctatagaatctgacaaaggtcaaatatccagaatctacaaggaacttaaacaaatttacaagaaaaaaacaaataaccccataaaaaagttggcaaaggatatgaagagacacttctccaaagaagacatttatgcagccaacaaacatataaaaagaagctcaacatcactgatcattagagaaatgcaaatcaaaaccacaatgagacaccatctcatgccagtctgaatagtgatcattaaaaagtcaagagacagtagatgctagtgaggctgtggagaaataggaacacttttacaccgttggtgagaatgtaagttagttcaatcattgtggaagacagtgtggtgattcctcaaagatctagaaccagaaataccatttgacccagcaatcccattactaggtatacacccaaaggaatataaatcattctactataaagacacgtgcacacgtatgtttattgcagcactatttacaatagcaaagacatggaaccaacccaaatgcccatcaataatagactggataaagaaaatgtggaacatatgcaccatggaatactatgcaaccataaaaagggatgagatcatgtcctttgcagggacatggatgaagctggaagccatcattctcagcaaactaacataggaacagaaaactaaacactgcatattctcactcataagttggagttgaacaatgagaacacatggacacaggaaggggaacaacacacactagagccaattgggggtggaggggcaagaagagggagtgtattaggacaaatagctaatgcatgcaaggcttaaaacctagaatgatggattgataggtgcagcaaaccaccatggcatacgtacacctgtgtaacaaacctacacattctgtacttatctcccagaacttaaagtaaaaaataaataaataaaatagctattttgagaaaactcaaagaaagtcaagataacacagagaaggaattcagatttctatcggataaagttaacaaagagattgaaataatttaaaacagtcaagcagaaattctggagttgaaaaatgcaattgacttactgaaaatgcatcgaggtcttttaatggcagaattgatcaagcagaagaaagaattagtgagttatttgaaaatacacagtgaatacacaaaactacacacacaaaaagaatttaaaaaatgaaacacaactataagatctagaaaatagcatcaaaagggcaaatctaatagttattggccttaaaaagtaggtagagagagtgatggggtagaaagtttattcaaaggaatcgtaagagggatttcatcaacactggatctgtcccacaagaaatgctgacgggagtactacaatcagaaagaaagggatgttaatgagcagtaagatcatctgaagctacaaaactcatggtaataataagcacatagaacacagactattttaacaatgtaactgtggtgtgtaaactactcttatcttaagtagaaagactaaaaggtgaaccaatcttttttcaagacataggcagcacaataacgtataaatagaaacaataaaaaatttaaaagcagagaatgagtttaaggtgtaaaggttttttcagttttctttttgcttgtttgtttgtgcaaacagtgttaagttgttatcagcttaaaataatcagttataagatagtatttacaagccccagagtaacctcaaatcaacaaacctacaacagttacacaaaagatataaagcaagaaattaaaacataccttcagagaaactaccttcactaaaaggaagacaggaaagaaaatagagaagatcacaaaacaaccagaaaacaaataataaaatggcaggagtaagtctttacttatcaataataacattgaatataaatggcctagactctccaatcaaaagtcatagagtcactgaatggattaaaacaaaacaaaacaacacaaaacaagaccgaatgatctgttgcccacaagaaacacacttaatccataaagatacacatagactgaaaattaagggatagaaaaagatattccatgccaatggaaacaaaaaaaaaaaaagaggaggagtagctatacatgtatcagacaaaatagatttcaagacgaaaactgtaagaagaaacaaggttactatataatgataaaggggttgattcagcaagaggatataacaattttaaatatatatgcacccaacactggagcatccagatatataaagcacatatctttagaactgaagagagagatagatcctaatacaataatacttgaagacttcaacttcccactttcagcattgaacagaacttccagacagaaaattaacaaagaaacattggacttaatctgcactatagaccaaatggacctgatagatagttacagaacatttcatccaacaagtgcagaatacacattcttcttctcagcacatggatcattcaaggatagaccatatgttagatcacaaaataagtcttaaaacattcaaaaacattgaaataatattaagcatcttctctgaccatgatggaataaaactagaaatcaataacaacaggaattttggaaactgtgcaaacacatagaaattaaacaatatgctcttgaaagactaatggatcaatgaagaaattaagaagaaaattgaaaaatttattaaacaaatgaaaatggaaacacaacacaccaaaacctatggaatacagcaaaagtagtactaagagggaagtttgaagctgtaagtacccatatcaaaaaaaggaaaaacttcaaataagtaacctaatggtgcatcttaaagaactagagaaacaagagcacaccaaaccaaaaattagtagaagaaaagagataataaagatgagagcaaaaataaatgaaacagagatgaagaaaacaatgaaaaaagatcaatgaaagacaaaaattagttttttgaaaaaataaacaaaattgacaaacatttagccagactaagaaaaaagaagatccaagcaaacaaaatcagagatgaaaagggcaatattacaactataccatagaaattcaaaggatcattgctggctactaggagcaactacatgacaataaattggaaaatctaaaaaaaaaaaaaaaaatagataagttcctagacagaacctaccaagactgaaccgtaaagaaatccaaaacctgaacagaccaataataagtaacaagatcaaagccataataaaaagtctctcagcaaagaaaatcttgggacccaatggcttcactgctcaattctgccaagcatttaaagaataactaataccaattctatttaaactatcctgaaaaataaggaggagggaatacttccatactcattctacaaggccagtattatcctgctaccaaaacaaaagacacataaaaaagaaaaaactacaagccaatatcactgatgagtattgatgaaaaaaatcctcaacaaaatactagcaaacttattttaacaacacattaaaaagatcattcatcatgatcaagtggtatttttcccagggaagaaagatggttcaacatacacaaatcaatcaatgtgatacatcatatcaacagaatgaagaaaagctatatgatcattttgattgatacagaaaaagcatttgacaaattccaacatcccttcatgacaaaaaccatcaaaacactgagtatagaagaaacatacctcaacacacacaaaaaagccatatgtgacagatgcatggctagtatcatagtgaatagtgaaaaactgaaaatctttcctctaagatgtggaacaagacaaggatgcccactttcaccactgttattcgacataggactgtaagtcctagctagagcaatcagacaaggaaaagaaaggacatccaaattggaaaggaagaagtaaaattatccttgtttgcagatggtatgattttatatttgggaacacctaaagagtccatcaaaaaactattcaaactgataaataaattcagtaaagttgcagcatacaaaatcaacatacaaaaatcagtaacacttctatatgccaactgcaaacaatctgaaaaagaaatcaagaaagcaatcccatttacgatagctacaaataaaatcaaacacctgaaaagtaacttaagaagggtaagatctctaaaataagtgttataaatcatcaatgcaagaaattgaaaaggacaccaaaaaatgaaaagataccccatgtttatggattggaagaatcaatgttattaaaatgtccatactatctaaagtgatctacagatttaatgcagtctctatcaaaacaccagtgaaattctttgcagaaaaaaaaaatcctaaaattcatatggaaacacaagacctagaatagccaaagctatcctgagcaaaaagaacaaaactggaggaatcacattacctgacttcaaattatgctacagagctaaagtaaccaaagcaacatggtactgtcataaaagctggccccatacagcactggaacagaataaagaaccccaaaataaatccatacatctacaggaaactcattttcagcaaagatgccaagaatatacactggagaaaggacagtcttttcaataaatggtctgggaaaactggatatccatatgcagaagaatgaataaaggcctctatctctcaccttatgcaaaaatcaaatcaaagtggactaaagacttaaatctaagaaatgaaactaagaaactgccaaaagaaagcattggggaaactgtccaggacactggactgggcaaagattttttttagtaatattccataagcacagtcaaccaaagcaaaaatgtataaatgggatcacatcacattaaaaagcttctccagagcataggaaacaatctaaaaagtgatgagacacccacagaatggtagaaaatatctgcaaactatccatctgacaagggattaataaccagaatatataagaagttcaaacaaacctatagaaaaaaaaactcataatccgatttaaaaatgggcaaaagatctgaatagacatttctcaaaagaaggcacacaaatggcaaagagacatatgagcatcattgatcatcagagaaaagcaaataaaaactacaatgtgatatcatcttaccccagttaaaatgacttttatccagatgacaggtaataatgaatgctggtgaggatgtggagaaaagggaactcttgtatgctgttggtgggaattagtacacccactatggaaaacagtatggaggtgtctctgaaaactaaaattagaactaatatatgatccagcaatcccactcctaggaatatacccaaaagaaaggaaatcagtatatcaaagagatatttgcactttcaagtttactgcagcacaattcacaatagcgaagatttggcagcaacctaagtgtccatcagcagatgaatggataaagaaattgtggtacatatacaaaatggagtactattcaatcataaaaaatgagattctgtcatttgtaaacaacatggatggaactagaggttgttatattgaatgaaataagccaggcacagaaagacaaacttcgcatgttctcacatatttgaggaagctaaaaaatgtaacaattgaactcatggaggtaggaagcagaaggatgactaccagaggctatgaagggtagtggaagacagtgttacgggaaactggggaagttaatggatatataaagagagttagaaagaataaataaaacctagtatttgatagcacaatagggtgattatagtcaaaataatttaattgtacattttaaaataacaaaagagtataattttattgtaacacaaaagataaatgcttgagggaatggattccccattcaccctgatgggattattacatattgcatgtctgtatcaaaaaataataaatttatacccccactgtgtacacacaaaattaaaaaataaaaaaagaacaccacagataaatcaaaatggatttttttacactgcttcagcagtgaaagaagtgtactgcctcatttccacagatcggggtagaagttcaggtttctcgcatgatctccaatgacacttggggttgagggaggtggtccttgttattgctgggcagaagtgacagttctgattccccactggccctctactgatgtctttctggctggaaggagtagaagtgcactgttagtccccccacgtggcctctatggtgttggggagatgatcctgttaccattaggtagtgtggtaagtcctaagtctccactaggcttcctcttccattaccccagagggaagtgggtggggtgcctcattactacaaggtgggaatgaaacatctgttctctacttggccttgtctgacactaccctggggtgggggtagacagagagtgaggttgacatgcctggcaagggaggaagtcaagtctccctactttgcttttgctggagtgagtctgggtggtgtcacagttttttctacaatgtttggctagagtagagtgactgctgtttcaacgtgttctctcttgctaggctgtccctttctgagtccttttactaggaagggcaggacatttttgtctgtgtacattggcatttttggatttttgccttcttttgctccaagtctgagatataggaggcaaacaaacaaaccagaaactcaccaccatgtgtcattcctcagatcccaggatccttagctagtctgtcttattctctccacatttccattgtcttatgtttgttttatttataatgttcagtgtttttaattgtacttagtaggacaaataggaaaaagtatgtctactccattttcccagaagttgctgcctaattttttaaatccacatttctctaatagggtacagaggcaaaggatgaatattctaaaatcaaattagccaatctttgcgtttgttcatcaatagaagaagggctgcaaagtattagataacaagatttatctaagtcatctgctcattttcctccttctcactctcttaccctctcagtaacatcctgtctatttcatctacttacacaaatctgtgtatttttctagataagacatgaaggtgggtggacattgtctcagtccggcctcatgcttactccacagtaaaacatgaaatcagatgccaataattatagacctcgccatagcaggacaataggcaatgttaaaaaatgagaggatgtgctcttcatttgtgtagccataatttatatactaactacactaattgcattaattatatgatgttacattatattatactacattcgttatacctattttgcatctttactcttctatttgacaatgagctccttcagggaagaggatgaaccaaatcggttatctggaacattgcaagcccctgataaatgctcttctttctcttcttgcccactcccttttccaccaccagctagttcaggaattaaggcagaaagaccaggggagaaacatccacaactaatctaggcttgaaggcttgaagaagacctctgaatgaataaccaggtaggtctccatcagtccctcaagctggatcttgcaggaggtgctggccacctttcacctgaccccatacatctttggagatcctgatttatgcagacaccaatgattggaaggaagggttgcggtaccctgtcttccacttccctcttttagagttctggccaattttgtcaatatttattcatttgtacaataaatacttatggaggaagagcaggatggagtgaaaagcatacccacaggcaaggttttccaaactgtgacgtgaggaatgccaacaggtgcttagtgataacgagtgttccatgatgaagtaagtttgagaaatgctgcttaccacactcagaagatcacaatgcacatcacagatcctgagaagctctatagttaaaaaaaagtcttttaactttgtttccagtgtttccccctttcctgacactgcaaaatactcgctgaaagcacaatattaataatttctttaaacttattcataaagctactcctaagaaaaataatcctaacaattccaagagcagggaaacaatgccaaagacagatgcaggtgaagaatggagacatggaataaagaaggtgtgatgttaatttgactgagtcaaaaagtagataaggatatggtggaatataaaagagatttgatacagtagaggctaagaactaggaggaatttagactttcagagtttattgagaggattttgagaaagcaatgattatactggtcaagaatggtggattcttttgccataatttgaattgtcatgtatcagtcaaggtctcagcatgaaacaaatggcatattcaaattaggatattcaaggaggatgtaatgaaggaactatttagaaaggtaggagtagaacatagggcatagtggatataccataatagatagcaaaatatcttggggccacaaacactggggaggtgtatggccttccctaggccagcatggatgagggaaaggagcagttcccagaagccatattgagcatcatgtagatagaactgcttcaagaagagcagtgatccaccccaactgtctccaggcacccccttcagctgaacccacagaagtcaacttcctaaagtaaacagcagtgtggaggggagggtggagaatagatatggaatggcaaaaggaagatatctggcacatgtctgaagctgaagaatctggaaactgccagcaggtattttaactctaccatttcctgactagctatgtctgttcatgattcatgcaacacttttatttgttttgtccttccttcttcctctacttttactttaggatccaggggtacatgtgcagatttcctacatgggtaaattgtgtgttgctgaggcttggtgtacaaatgatcctgtcatctagctagtgagcatagtacacaataggtagtcttccaaagcacacatgcccccacctttccctctcaagtaggccccagtgtctattgttcccatctttgtgttcatgtatattcaatgcttagctacaaattataagtgagaatatgcagtatttggttttctgttcctgcgttagtttgcttaggataagggcttccacctgcatccatgttgctgcaaaggacatgacttcattttttatggctgcatagtattccatagtatatatttaccaaatttttgttatccaatccaacattgatgggcatctccattgattccatttctttgctatagtgactagtgctttatgcaacactttgaaagacagcacccattgtgtcaagacattgtgttgagacagtgaagacacaaagatagtaagatagagactagcccttaggtatgtaaaatagctataaacagagtgaaaataggaaataattaaaatatagagtgaaacataaagaaatacagaaagcataagggagttcagtgcagagaattttcatagctaacttatgactttagccttgatgggcaatgcaataaaattgttggctaaggtagcctttctagcataaatgcaaatatcaagaattttaaaagaagtatttaaatctaatttcagctatcaatgaatgaatttaatttcattactataacaaaaaataatccataatcaaaattttagctactcaaaaaagttgctttctgaagtaaagtatatgataaacacaaattcataaatgctaatttttttgtgaaacaccagcattttgtgtttagtctctgacacttttaaacagtcctaaaaatatttgttctcgtaaaggaaatccttagtattgttttaaataaactttaacctatttcctttttggcatatttctctccaggctttgtctatatgcatatgttcttgacctggactctctgaatccaaagaactttataccattctttaattaaaagaggtagaatattgtggtcatggggtttttcaaataattcgggaaatctcagccatattttggctagacctggcactatcccaaaataacatggaaaatcattgataagtcctgcatgagtcatctgtttaaactgaagaattgggataacggtgtcattgcccatgctgatcgagacgttttgcacaagagagagttgacaagggacaatgaactctttcggaaattaaaaaataatttgtactaaaatcttgatgaaaatagaaagcctcaactgcaaactggcttgaatatataactaaaatattatatttatgacttagataatattgtttagttttgtctttctattcttgatttaaaataatatatatataatatatatatatttacacacacaaacatacatatatattccttccctcaccttgcctttccccccatccccaaatagaataatgtgattccctgcctatgatattagaatgctgtgtgcaccaacccccatgcttgtggttgaaattctacagatacaaaagctctcttgcagtctacccacacattcaggagtcacaaggcaggtgtctgaagttggtccttttttccctttacttatggaatttgtaaagtgttatattttcatctttataatggaaaaagtaaaatgtgatttattttacaaaatttcaccgcacaggtacatttgaaagaataaggccactctaaagtgaggcatatctcaacactcatattatttcaaaagaatcacaacaaaaataaaaataataaaagctattctggcacacaatatccttcaggctcaggtcctgcctggccctgccccattccttggggcctctacccacccttcctcacacccaacatctaaaactctgaccgcactgaatcacttctggttccagccttctaaactgttctatactgctctccacatccacactcctcctctattgtccatctgacatgcatctattccattatccaggaagctttttatttaatagactttcttttttcgagcattttttagattcacagcaaaattgagtggaaggtagagagacttcccatgtacctcctatttctacacattgattgccttcccaccagagtggcacatttattgcaatgattcctctacactgacacatcatcacccaaagtccaaatagtttattttagggttcactcttggtattgtacattcagtgggtttgggcaaatgcataatgatatgtgtctaccactgtagtatcttatagagtagttttactgccctaaaaaattatctgtgcttcatccctcactcccccaatctctagcaaccactgatctttttactatctccatagtcttgccttttccagaatgtgatgtagttggaattatacagtttgaaccttttcagattgggttctttcacttagtaatatgcatttaattttcctctgtggcttttcatggctcatttctctttagcattgcgtgatatttcattgtcttgatgtaacacagtttttcatctatttaccttccaaaggacatcttcgttgccctggaatattttttagcccttaaaccactctccagagaggtaactgctcttttcttggtccccactaccacaccccaccatcttgcatcatggcatcaatgcacattactaaacttatgtcctgtctcctaagctgtaagctccttgtctaatcattgtgctcccaatatctaggccagtaggcacttaaaataattgctacatggataaatacaaaaattccttttcatgcaagagaagtggtagctttgaagagcaagaaaaatatgaaatgaaggcaatcagcttttttttttgcttatatcttaagtattgggtattgtcttaaatacttcattacagtatttagtgctcaactaattcaatgaggtagacattgaaattccattttttccaatgcagaaataggggcttaaaaaaagtaagtaacttgcccaagaagccacacattttagcaaactggcagccagaacagaagcccaggtttctctgactggagagcctaggagcttggctatacaccaagcataatcatactcttacacagcgtcttgtgtagagaaggaaatcatttaaatttagccacccagttgagaaagcgaaaactgggtttcaactcaaaggtcacttttccttttgacccaaactgactcttttgaaagagcccaggtaaaaatatttcatcatatatctttgcccttgcacatatctgtaagcattcctgcttttctctttgctattctgatttctccaaactgcaagggcagaggtctttcatctcagtgtcggaagttccagctgggacaaaggactacagttgcaggaagtgctccctgaaaatcttgtgtttaatctttgttttttcccaagagcaacaaatctcttattttttttcatttaacaaatatttttattgaagacttttgatatgccaagtattgatagaggtattgatgtatacaatgataaaccaggtgcccaccatgatattgcagctaagagggatttttttgaagatcaagagagttaaggtcactgaaagtccttgataggctctggaactaggagggttattacttgttctggttatgaattggcttaaaacaaatggtttttatgatatcttctagttgtatagattgactgggctctgctgagggttctcatctcatgaggttgcggtcagatgcttattgggtccatcttgggggctggcacttgatgctggcagtgggctaggtcaggttacatagtcaccccatgtaacatgggcttttcatagaatagtgactggattctgacagtgcaggatcatcacagttcaggatctggtccttggcttaaaataccctgaaacctattttgtcaagcaggggtctcagagggagaccctggagatggtgggcacaggacaggagcagcagaaccttcaccaggaggatcccccctggtcctgtgacccatgcgtccagctcggggccctcaggtgggggctgcaaagaagctggttgtcccttgaaagctggagcaagtgagcaggtacacttggacctgaggctgtggtttttccccaggctgaagtggatcttgaggtggcaaggaatggaacagcctggcgccctgggagagtggagggtgactttgaactgggcatcagcagatgtatgcccagcagccacttgcttttccattacatgtgaatcagcagggccaagttcacccttggaaagaagttgtaaaaatcggttgatgcctttgaaggcctttgttttggaggcttctttgaagggtcttgcatccagttctgaccttggagcaagtgttaagtggcctcgaggaatgtcactgaggctccttttggaacagattcaggaagaaaacgctgtcttgaaaagtgctctcttctctttgtgcaggggagattcaataaatatctctgttgtataacattccttgtattatgtaactcttaaaacttttacaaatgactttcatatacatcatctgattgttcagacttaaagggtgtcagacatctgctgttgatggctgtgctttttgaacaagggtagtgaagtaaaaactccctcccttcctgcccaccccctgttatgtctcttcctccatgtcttacccctccccctcctcccatcgctaggcttgttctttacttcttctttctgggaggtgaggtgagaagggggctcctacatagcatcctgtgtacctgtcacccaactttcttccatgatgacatgtagtgactgtagttcaaaatcaaatccagaacactgaaattggtacaatactgttactgtactactacaactttcatatatatatattttcttttctaaaattaagagcacacaatttgcataagtcttttctcttttattctgtatagtgggtaaggctcagtcctcaggtgttactgtaatgatgggcttccctatttttcatgtacaattacatggctttagataggaatcttctttatatattttatattaacaaaagcctttttagatattaatttgtgataaaatgaaactgacccagaaaaagtacacactttttcacacacacaaaaaaaattggcaaaagaacagacacttattgagcctctgctatatgccaaggactttgccaaacaccggaacacagtgacgcaaagacagtcctctctcaaagggttcacacatcagagcatgagccttaagctgagatataagaaaaacgcatttctaaaaaagacctcttattgagacctggggacaaatggctgcattatgtgtcaggaaagagactgaagcacattttgtcccaacatcaggagttgattctggtgaaccaaacagaagaaccaccattgttaaagttgggtataactggataatctggggtggaactaagaaaataaagaagcctgggctagaaaaggattgaactcaaacaagtcgcacatgctgggatccatctgtgttttgcctatatcttgagggccacacctcaaacatctattactttgatatcatcttcaagccatacaaacaaatcctcctccttctaaagagttcctcatctccctcactgtcacagtatttcccagctggcctctattctccctccctctcttactaggctgtgagtgtttctcatagctacctgttctctgcttttaccagcccaactcagagccacattaccctcgtcgcttgcatgttttctcttaaataaaagcatcttatttagcttcattgatttgaggcatgtattagtttcctgagactactgtgacaaattaccacaagcatggtgggttaaaacaacagaagattctcctctcctagttctggaagccagaaatccaaaatccagcaggactacaattccttcatggactccaggggataatccatttttttgtctcttccagcttttggtggctgctggcatttcttgacatgtggctgcatcactccgatttctgctcccatgatcacatcacctcctcttcttctgtgtcaaaccttcttgtgcctcacttttataaggacactggaccttggatttagggcccaccagaataatccaggatgatctcctcaagatctttatatctgtaaagaccttttctacaagtaaagtcacattcatagtttttgaggattaggatcggagatgcctttttggaggccaccattcaactcactgcagggcttttcctgtccaatccctctgagtgggtatcagtattttcaccacattatgctcctattcagagtcatcaatggtttttcattttctctctcttcaaatctgaattactctgcctggcattctaggcttaccacaatttggccccacctaaatttggtaccccaccaacatcccataatttacttcaccagacatttagtagtgtctactatgcctaagacactgtttctaggcttttggggacaccaagataaatacagtgtcacccagccttcacagagcgtgtggccctgctgaggagacaaatttacacagctgactatgaaacacaacacaacaaacaacacagtcccttcccaccaggcagcctctgcactatgcacactcccgctactctgctgcattcatccattctcacactgctatgaagaccaacacttggtcatttataaagaaaagaggtttaattgactcacaattccacaggctgtacagcaggcgtgggtggggaggcctcaggaagcttataatcatggcagaagggtgaaggggaagcaagaacatcttcccatggtggcaggagagagagagagggaagcaggaagtgctacacacttttaaacaatcagatcttgcgagaactcactcactatcatgagaacttgctgttctgctgccacaatccaatcgcctcccaccatgtccattccccaacgctggggattacaattcaacatgagatttgggtggaggcacaagagccaaaccatatcacatgcttttaactattatccatgatgtgtgacacagtttggtacttaatcacatagtcctacagcttcactactgtaatcaccttttgtgtcactcaagaaaatgtttcttaaacataagaacttctgcttctcttactttttaccagagttattataggagtgttacaaataatggtgtacatgtctttgtgtgagactttgcttgtactaaaatcatttgttgcatctgagatcactggttgaatgtggtaattgaccctgtgaggtaaatttggagaaaataaatggtgtgaaaaagagcaccccctctctgacagcctttaatgctaaaggggcagcaatatactcaagcagaaaaagctggaggccctgggaggggctccacctccatgcaactccagccagggcaaaacagtgaatagggaaacatggttcagagagagccagcgagtgtcaccaactacagcaactagactgtgcaaacgacagtaaaaaatacttttatttttctttttatagacatctaagaatttttatcccagctactcagggggctgaggcaggagaatcgcttgaacccagaggtggaggttgcagtgagctgagatcaccactgcactctagtctagcctggtcaacagagcaagactccgcttcagaaaaaaaaaaaaaaagaaagtgtccttacagcagacatacaaagagttgagggaaaaatctttaagaagtcaaaccaagtgacatggttttatgcttctattcacataaatttatcgaaatttcctaaactaagcacactttttaaagccttaaaattttaaaacaaaagctgaaaacttaggagataaaattgtttctaattctggtttattttggattgtctctcagaagtttaaatatatatatagtatatataattatatatattatatatattatatatataatatatattagaaaaataactagatataattttatagttactgattttacatataatctatctaatactgaatactaaaannnnnnnnnnnnnntatatataatatttgaggatataattagattttttatctttagaatgataaaaattaaattatatataattatatatatataaaattatatataattatatatatataaaattatatataattatatatagactgtatctatagttacagatacataaatatagatagataactatagatacataaatatagatttatattatatatataatatttaaaaagccaccatattgttcaagccatttggcaaccattttttctttatacaaattatattttgtaatattcttcaacataattttctaatgattatatggtattccattttgtgaatgcaccaaaacttaatgtataatttcttactgttaaatatttagatctttccaattttcaatattataagtaatgctactaaaagtatccttttacatatctcttaaatccttataattacaattgctgtcttgaaggatatacatttacattttttacttacattatcaaataacaaagaagtttatatcaatgaccaattcaactaataaggaatgtcacattagatttttttattcatcattaaattacaaggcaaaaaaatgatattttgttttaatttgcatttatttgattgttgaaactgtatacatttttctcatgcatttcttctttgagaattacctgattatatcctttcctatttttttttcctggaggtgatggcttcttttttttatttttagaagttgcttatttaagatagcaattgtttatagtaaatatagtttataatgttaataatgctttttggctaatttaaaaaaatttgtcgtccagagtcccaacctttggaatatatttttttctttttttatcatgtttgtatcaagatgtagttaaactcatggcacattttaaacatctgtaagtcagaaggatcacttttggaagaggccaattactggcaaaagtgattcattatcaagacaaaaagtaaatgtactttggaagtgtaaaaatcttaaaaaatccttaaagaaccctttataaaagcaatgcaaagtatttactatacatctgaataatatgcacttcataattgtgcctcaccccacctcctaaaatcttatatcgatctgtgttttgggtttgagagccaccttaatgtggaaatgcaagaatcagcaggatcaagtccaagaagaatgaagccagatggttctgtaagacccaatgtgaatagacatatacaacaggaattatttaaactgcttaaccattcccacaaaaatgagtaggtatatttaaagaaaacttttttaaagcagaagttatctacaatattccaattgagagaagatatattcacaggcagtttggacaagatgactccagtcacatgaaagtttagttttattatagacactttatgcaaacatttcaatactttttgctacttctataatcttttagcaaggcagtcagttacagtccaaatgggaaaatataaacaaaattacacattttatcttttaaaatctactttaattctgttataaaatttataatgcagtttaaactatgatttctctccacttgatgatgtctctcactctgttcctttaattacgaagtctctgaagactctgaacttgactgaggaaatgttaaacagatacctcttcataattctgtaagtgtttgcttttaactttgaataaatgtcatatctaaacaaatattaaaaagtatttaacatctcatacagtcagagttcactggcgctttgttccagcctggacactgaccattgaaaaatagatgcctttctgtgccagcagctgctgatgcgtgccatgctccttgactctgccattctgaaacaccactattaagtctgcattctggatggtggacaggcggtgagcaatcacaatgcaggtgcggccttctctggctttgtccagggcttcttggacaacctattccataatcacatagattaattctcataatagttcttttccctaattcctcttccataaaaagctccacagtaggacgggcatggtggctcacgcctgtaatcccagcactttgggaggccaaggcgggcagatcacaaggtcagattgagaccatcctggctaacacggtgaaaccccatctctatcaaaaatacaaaaaattagctgggcttggtggtgggtgcctgtagtcccagctagtcgggaggctgaggcaggagaatggtgtgaacccgggaggcagagcttgcagggagccaagattgcgccactgcactccagcctgggcgacagagcgagactccatctcaaagaaaaaaaaaaaaaaaagctccacaacaatacaacaatagatccttcttaacaaggtgtcagtgaaatagaacaggtttttgaaaacaaaggatttgtcatatcagatgactgaaccctaatttgggttagttccgaggcagcagttatctatccctaactttttttttttatttgaaacagggcctcactctgtcaccagggtggagtgtagtggtacaatcatggcttactgcagcctcaacctcctgggctcaagcgattcttccacctcagccttctgagtagctgggactacaagttcccaccaccatgcctagctaattattttattttttgtagagacaatgtctctctgtgttacccaggctggtctcaaaaatcctgggctcaagtgatcctcccacctcagccttccaaagtgttggggttacaggtgtgagccacggcagtaggtgccggccagcagtcatctactcttaaagttaaggcagtaaatacagttcactgactcatttaaaaacatttactaatgtgtttaccttagtttcaaggatgttacaacatccttgaaaacagacctcaaatccagctcacagtaaattcaagaagcctgagcaaaggccaaatacagactcccgaatttttttattgtagagaatacctcatactgagttcgtctttcagataatctgaatttttaacgttttctctgactagaaatgattgctaatatttatcttaaaaggtacagccagattttaacactgtcttacactaccacttttccttatggttgctgaagagatgctgccagtagaagtaggaaatatggttcctgaaagcagcttcttaggtcaacgcaaactgatctagtgatggtttgtgaagcatatgtgctctaagactaatctgccttgtgtcatctttactctcctgaataacagctacagaaagtgtttacattttactgaaaggtgatgtaagtaactgtcaataatctggctgcattttgttctttactatggagaatacagcatttttaaggatgactgattcaagtatggatgaacccaatttaaattcttaccttttcactttctgtatccagagctgacgtggcttcatccaaaagcaaaatatgaggctgtctaacaagggcacgagctatggcaatgcgttgtttctggccaccagagagctgagttcctttgtctcctactttagtgctatatttctgtaaataaggttttgttgttatgaaagtagaactgaaagtaaagttctaacagcttgcttatagaaagtaggatagacgattctatatactccaaaaatttaggttcagaagctaagaatggttcatgaataattaaggaaagaacagtaaaaaagcccaaaatggcaggtttactatctatttgaaaataaatgtttgggccttaagatgatatgttttagtgtaaacaggtcagcattttaatgaagaagaatattgttgcaatgttagtatcttccatcttctgatttcattatatttgggacaaagattggcaggagaaaggaaatttgatttgaacaaagtattcataataaaataattgaagctcatcttacttgtaaccagcaggtgacactctctgcatgattttaaattgaggaaagacattcttgggatatcagccttttagtgtctgtttttatgaaagtatctccaacacttaaacaattttaatggatgctatcaaaatggattccattttgatatctaactttgaaaatgaacatctcctttttaaacatttttgttgttagagtgctcccaaaattcttcccgtgttgtttcccacaatggataattgtcaccaactattcactatgatgatagggacagcagttaaaggttactcaggagagagcagaaacaggatgtgactgcacttgtaacctagaaaacaatactatcttattatttccaggctgaaattttagtacagggttgcctatttttatttgctatatctggcaaccctagttttgtggcactcagccctgggtttccccctgtaaatagagggagaagacgccagatgaggttttggcagatgcttgggactggctctaccccagagctgtggctgtctcagaaggcaggagcactgaagtgtatctcatgtgagtggagggtttactagttgcactcttgatatagtactgatcctgttgaggcagataaaggcagtgcggcagtcttacaaggaggtagctaaaccagccacctacagggtgaggtaaatcctagtattaatcacttaggagaagtggatccttaggtaataggacttaggggttttaccttttctctcctggtctagacactgaggaagagaattatggtgtctacaggtgtgttctgtgtgacagattagagaccaggatttgtcctgtggtagacaaatgccagagaggcaaagtatatttaaaaagatagataatagttactctctgtgtttgtgttttattaacccctagcccagtggttccccaatttgagcctgcaacagtattacctgggctcttaaaacgtggattgctggatctgcagtcctaacaggttcccaggtgatgctgatccgtgtctatacttgagaaccactatcctctcatcagtaaaggggattggagctttctgttttaaatgtttgagcctggagaagggtcaattatctagttgggctagactgtgaaaggagagtgggagacaaggccacctccctgggacttaatgagattggtgtcagcagttatccaaagaagagcctatggaagaagggaatcttgggaaagagagccacctggtgttgcttgcctgcctcgtgaggaaactgtcttccccgccgggttgaggctcctgagctttgttttagggggcacttccttagaataaagagcataactggtgataatgggtgaggtagattacctaggttgagaagcacttcaaaatataggacctaacttttgcagcaacatggatgcagctggaggccattatcccaagcaaagtaatgcaggaacagaaagccaaatactgcatgttctcacttataagtggcagctaaacatcaggtactcatagatgaaaagtggcaacaatagaaactgaggactattagtgtagggagggaaggggggtaagtgttgaaaaactacctattgggttctgtgctcagtacctaggtgacaggatcatttgtaccctgaaacctcagcatcatgcaatatacccaggtataataaacctgtacatgtaccccctaagtctaaaataaaggttggaaaaaatctaattttggacttttaatacaggttgagcatccataatccaaaaaattcaaaatctgaaattctgaaactttttgagcaccaacatgatgccacaagtggaaaatttcacacatgatctcatgtgacaggtcacagtcaaaacacagtcaaaactttgtttcatgctcaaagttattaaaaatttgtataaaattgccttctggctatgtgtataaggtatacatgaaatataagtgaattatgtatatgcaaatattccaaaatccaaaacacttctggtcccaagtattttggacaaggaatagtcaacttgtattccaaaacaaaacaaaacacaaaaactaatacacaggacctaagagggcttgagagaggatgagaggttccatttatccaacttcctaggaggaattcagaggacacccataggaccacagcccagggagccctagaaaagatttcaaccattcactgtaaacaaagtttggggcccatgaaatgtatgacgatgagagattacatgataccatggtcactttaatggttcaacccttattcagagagagcactctttctggcatgggttcagccctctggactggactgactccacagtgagttttgaggcttgggagagagctgcaaggaggaagaaggaagagaaataggggagagacatggggagagacagtcatgcctacttcctcagcaggccagaagcagcatgtgcaggtggggacccagactctgtacttggacttaaagtgaaaggctttccagatattgtacttacccctaaggctgacaaaggtggagcctcaagcctatagctttggatcaagacaattgttccagttctcctatcccagaaatgttcctctctcctaaacctgaagtggtcgaacactttcatcccttcctcacaaggagggtcaggtgatcaggtaaaggtaacaactaacccaaacaggaagtgtggccagatgcttgtatacaggtaagggtgtgatttggttgctaatttctcttcacttctgggagaccagccccttataaatcaaactataggccagagaggctgccacatgctcccaggctgtttatttgaagagagacttacattaggcagtgactcgatgaaggcatgtatgttggcctcctttgctgccctcacaatctcttcctgtgacaccacccggctgttgtctccataggcaatgttctcagcaatgctgcagtcaaacaggatgggctcctgggacacgatgcccaggtgtgctcggagccactgaacattcagtcgctttatttctttgccatcaagcagctgaaaacaagagttcacagatcaacttcaggaccagcacactttgaatgtagcacaattaacatcattatttcttacactgaaactgccaagttactgtgagattaaggaaaagtttgtgtgattaaaatttggatagtgaaggttaacccaacaaggtcataattgtatgccttgaggaactgtcatgtttcctgtgtttcaaccatggtttctgatgtatgcatgtggtaggcagaataatgttccctctcccacaagacatctgtgtcctaatccctggatcctgtgaatgtgttatgttacatggcaaaaagaaactaaagtagtagatgtaaggttgctaatcagctgactgtaaaataagattatcctgaattatcttggtgaaactaatgtaatcataagggctcttaactgaagaagaaggagggagaagagtatcagcaaatgcagtgtgagaaagactcaaccagccactgctggttttgaaaatggaggaaggggccacaagcaagaaaacagatcatcctttggagcctctagaaggaacacagccctcctgacacttgatatgagcccactgagacctattttagacttctgacctccagaagtgtaaagtcataaattggtgttgttttaagccactgaatttgtggcaagtggttatagcagccacactaatacaacgcctaatacttctgagatgtatcctgacagccttattcttaaatctccatttttcagagaaacagtgcccaggattagcatggaaataaataacaactatgaccacataatagctttgcaggtcaggaactacaggggatggataggtgaacaggggtaggaaagggtgaatggagatcctcaatactgagccagatgagtaggaacagagggctgccctttctctataatctggctccctggattatcctgcagaagactggggagggcaccttacagccttgctgataacaagccctactctgatgcaaatatgtctatcagataggtctgctttgcaagataattttctggcattcaagtgagagagctgttcatcccttctgaagaaggcaccagtgactcagctttgagcttttctaatagtagtgactagtgcgtgctgagccatatactctctgtatcccatgtgcctggctgggtggctcaaggggacagctgcctagcagtagagtacaatctttgctacaggaacatggcttctgcttgtgacactggcaggtgcagggatggaagctctcccataaccttattagttccaagctgagttgccatggagactattccacacatgtatgctccaggcttccttacaatgttaataaatgaaggtggaaagtagagggtggagagagacagtgaaagccaaacaaggatgtggctaagcagcagatcttgttagataaaacactgtacttgagaagtggaaatttaaggaaaggaggagtttggtttttgcttttgtttttgttgtaattttccaggtttatacccctgggaggaaaacagacactgcctaactaatataatcacaggcaaatctgaatgatctcagcaagttataatgagtttcttcattacactgaatacactcttgggcctcctcgtccccgcataataccctagaattgcaaactatttaaaacctgtgttgactgaagaattctttctttaagtaaaacaagtttagatgcctagaatgtaaaacagatcaaagaagcagagcttctttggctgaggaatggtgttggtctgaggaaagaccaaggaactctggggaatctatgagaagtgctcaaaaaatcctggcctaaataaaaatataactaggaaagtaaacctattggtaagaaataatgaaaggccagattaaaatgattggctatctctattgtagactgttaagtctattgcttgctttcattagcgcaaaaatgtaaatgttaaatgtgtattcttctatgcatatttactgtgaaataataattgatttttaaaaatcaagcactgacaacgttgtaggttctgtgataagcatgtctcatacagtctcttgtttaaccttcatagcaacacttataaggtcactgtgatgttaattcccattttactgataaggaaatgagcaaagttaagtaacttatacaaggtcacacaattagtaattgggggaaaaccaagactggatctaaacactctaggttgggttttggtaacactaatacctcacaactgaaagatattttgtgtccccccttgaaaggggaatgcccccatcttggctcaggcacttcttgggttataaccagacaatgacaagcagcttctaattgtatcccaaagggggttctgactgttgtatatgggagagactggaaaggggagaaaggaaaggtaaggggaagactcaaagcaggggtgatttaacagtgacactgatgaaggttaagcttcaagagccctcaattacatgtaaattctgggaagtcgaacagttttctgggtgggagggaggcaaggctgtagtcaggaagctcttccctgtaagtattgatgataaattacctaaaaatgaaaagggaccagaatctttaagcttccagtatttggttatgatttttttttcatttgaagtaaatatccacctttgtatctaattttgcattaaaaaaaaaattttttttttttactttaagttgaatccctacaattgtataaccttcaggtccctcaaaacttggaggatcctcccatcttcacaatttcatagcttaattattcaagactctccacaatttaacctaaatctttcttcaaatttaccagttcagtggctctcgaatgatggttggcatcagaatcacctcggaatattataaaaataaaaggccaaaccctagcctacttgaataatccaggccggctgtgttttttactagctcttgaggccattctaatattcaccgaagctttagaaccaccatttcaggtcaatgtttttcaacatgggattcaaggtccactgatggtcacgagaatttcctgacttcagggggtccttagggtccaatcctttctttaattcttatgctcaaatccacagactcatttttacatggcaataaaaactaattagtagtaatccactgagttattcagggctactcattgatgtccataaacaaaactttgtacatttactagagtttattgtggacactttctgctgagaagtctggctgcagtgcaccatctggcagtatttccaagccctagtgcaaatgcacaggagaagataatggatattcctgcaataaatgaggacactttgttttcagtgcattatcaataatgtcttgggatgcttactgtcctatgcactcagcattcattttcatatacttctgtgtctgaccttttatacatcaagggactagaaggctaaaaactatttcccagtttcccttggttctggaagtaagtcagggtctacgagggagatgcacagtgtaaaatctgggaggtagacaccagctctccttcagcagctgtggtaagctaacggcttaactcatctttggcagacaagaatttctgcaacagccagattctagtctcgtgtctttaaatttggaacagctgtgatatcggcataattttctgcagcttcttggttacagaatcacagctgcagtgctgtgatttggaagtctgggagcaaatagcctcctttcactcttccagcccttccaaagattttgtaagcatgtaattccctttattaaatacttatctacttgaaatacctagggcagtttctgtttcctactctgaactgtaactgatgctgtccatgttttattatgttctgcttgtgtttatatacttgcagaataatcattaattattccttattgtatcattattgtgctgtattgtattgttgttttcaactccaacattttgttatcaccaagtgtttttcccactggaaagtgactatgagtacattagtggatggtgacatctttaaatctttcctacatgagttctcatcagagaagtttgagaaccactactcaaactaaactcccatttcagccaaagtgtcctatttgctgcattgggaacaaatcactgatcgcagcttgtattttctcttacattgaatgtcatccctactgttcacccatatgcaaatccttatctcttaagaactagctctaggcctatctcctttaactcacaaaactatatgccccatctcctcagttaaagtatttgagggcagatatcatgccctacaattcattatagcacaatctttaacacaccacttaataactgtctgttgagggccataatcagtgtctgagagctaacatttcctcctctaattgctttggctgtcagcgacgtctttatttagagtcctgtttttaagttcaccacaaaattgaaggacacaatcagagttcacagaaaatataaagcaagagagtaaaagtagggaacaagcttgtaatgatttaagagtaaactgaataaaggcataactgtctttgaatacaataacaaacatttatgagtaagagtgaccgctgtgaggaagtaaaaagagtcctagactaaagattgaaaactctcttttcatttgagtcattaaatgctaccagcgtccatacacagcgggtgggcatccatctgacttgtactagcaggcatccattctgattggtcagtgtccatgctgttcccattgttaagaattttaaatatcacttctcagtacaactaattacatgcctacataatgaaaatgtcttgctcttaattctattccttcctagtttgtcttctttcctatcccccatcatagtcgtttaaactcactactccctgccagacacttccctcatccccagcaactaagacaaaagggcatacttccatgttctttttacatttcccaaatttgttgattctacttttttttcctcagatgatgtttcaatgccctctctccatcaatgattttgtctcatccccagtcataaaaatgctcaagagttcaacccctaaacattttccctggactctgcctccccactcaagtgctgtccttatttgcctttcttttactttccatcttcttgataatctatgctcacttacatctccatttcttcccctaatcatacttcagccacccttaactgtttcctaccatcactacttcactaagaatattttaaaatgtcagaaatagcccattcattgctagattctatcatgtcttctcagtctcctccttacccaatctctctataccatctgtcattgctgaccaccatctttgaaacagtctccatccttggctttcatctcactcctagcacctgtcctgtatctttctggctacttccatttttgttggttcttttcaagtcagctgaaacctaagtacagcaagggagacaggtggtacaaagggtgcttgcaaaggagggtagaggggtagtgttgaggggagcctggagaagttggctgggacagatgacaccacttggagaccatatttaggctctcagactttatccaagtgggactgttgtttaaaggtttgaaaaaacatggcttatagttgagaattaaatacattcagacatttggatgatgaaaacctgaactgagctaaatgtgaaagtgtgctcaccactttccctgccaaggggtcgtagaaccgctccaggagctggaccactgtgctcttcccacagccactgctgcccaccagagccagcgtctggcccttcttcacctccaggctcagtccctgaagcactgggatgtccggtcgggtgggatagttgaatacaacttcaccaaatgtgacatttccttccaatgtgttctgcaatgagaagaataacagtaaatttgaatgctgcaatactgaaaataaagtgtatagctaactctctcgattaccaggtgtcagaagataattaatttgtgttacaattggcttcacttcaaactgctagaatttattttattttaattttattatttatttattttttatttttttgagacagagtctcactctgtcacccaggctggagtgcagtggcatgatctcagctcactgcaacctccaccccccaggttcaagcaattctcgtacctcagcctcccaagtagctgggattacaggcgtgtgccaccacacccagctaatctttttttttttatttttatttgagatggagtttcaccatattggccaagctggtctcgaactcctgacctcacgtgatccacccaccttggcctcccaaagtgctgggattacaggcatgagccactgtgcttgacctcagactgctagaatttaataaatgagatctaaaagagtaaaagctttcatagcatgtattgttaagacaatatgaatatgcaatacagctacaataactcaaatctgttcctcaggaatacagtaacttacatacaataaaatctgataaccagcctgggcaacataacgagaccctgtctctacaaataattaaaaaattagctgggcatgatggcacacgcttgtagtcccagttacttgggaggctgaggcaggaggatcgcttgagcccagaagatcaaggctgcagtgagctatgatcatactgctgcactccagcctggatgacagagtaagactctgtctctaaaaaaaaattgtttttaaaaaatctgattaataggttttgcttataaagtgagcagtattcctatttccctataacctttgctacgtaaaagtactgaatgttgatgtatattattagcagtaattgaaaggaatctatgatctaggaagttttattttatcatcagcatatttgaaagtacaaattttattaagtttccacttaaaatactttcattcaggagtcaggagtagatcaaacagttgaaacatcaaactcaccggcattaggccttccgtgctgtagctgtcaatcaaaggggttttttcaatgatcatgatgatgtgggctgctgatattttggctttggcatagtcaggagcaaatgaactgacttgccccacggccatggcaccaaagacaacagctgaaaatactctggaaagcacaaacacaaaacatgtgcacagcattaccatcacaatgctagaaagctgacactcctttttttttttttttttttttttgaggtggggtcttcctgtgttgcccaggctggagtgcagtagtgcaatcagagctcactaaagatatgatctccagggcttaagcgatcttcccacctcagcctctgtagtagctgggactacaactgtgcatgaccacaccagctaattgttttattttttgtagagatgggggtctccctatattgcccaggctggtctcgaactaccgggctgaagtgaacctcctgcttcagcctccaaaagtgccgggattataggtgtgagccaccatgcctggccaaaagttgacacttctataaccagagagctttgcctctaatagttataaaacagatgttaaaaataaaacaaacacatttccttataagttcatgtctatgtgatagattgattgcaaaatggcccatttttttccctctgtatacctctctctgtatcctcatcttcttgcactgtgacctttgcagcaccctttgaatctgggctggccttgtgacttgctttggccaacaggatatggtggaaatcacttttgccagttccaagcctatgactcagggggccttatatgctttgtgagcatgcatgcatgtgttctctctctctttctctctctctctctcagaattctgccactgtctcaaacccaggatagcctgctggaggatgaggcacacatggaggagagctgtctgaatcccaaccaaccagctacagacacaatccactacagacacatgagtaagtccagccgagatccactatgcctaatccagatcagtagaacttcacagctaacccataggtttgtgggcaaaaatatgtatgtctctgaggtttagtggctggttgttacacagcattattgtggtaatcaacaacggatacagtcagtgatgttggaattacatcagattcttaaaaacctatgaattgtgcaaccaaaagaaagtttcttacagagccagatatcatgttgctcttaagatgcattgacgttcttatctatgacatgggaatcacagcaacttaaagttgggaaggaccttacaggtatcaagtccagctctccatgttcgtgcctggacacctcccctaaattggcttccatcctctgttttaggaagtagcatgtttgattgtctattgttaaacagttctttttcaaactgaagaaaaaatttacttccttttacataagacaggcctacaagtcttgaaatattgctaaaaactcctttgcttctttgataactcctttcactgcccttctctagacacatttattaatatgctttttttaaacacaagcctggaacagacataatacttgggaacccgcccagaatacagggaattcatcgctttctttcctctggactctatgcctatgtttgtgtagcatattgtgtcattagtttttgtttgtttgtttgtttaactagcactaaataaaataccgatagttaatcttggacttgtgatcatttaaacctatgggacctttttctaatgcactgttcttcagacaggtcttccttttccttaacttggaaggttgattttgcaaacctaaatgccccaatgtcagcaactttcatcaattcaattttttggagtaaagcaatatatcaaataattatctaatcaaagccccaatgccagtgatacttggttttgatctctaggccataatcacaaatagcacctgcatatcatttgtccaatgtacatctttaatggaaatttagatgtctttttgggggtcatcctgagcaaactgtaatgcatgaacaactcaatgtttaaaaaggacagaaatactatactaacacattatactgccaggcttatatgattctggtttaaatataaaattatatcgctactaattatgttatgctatcaagaggcagaatcttacccacctccaaatctagaagctcagaaagattacacatacttttgaccaccaaattgcatatttgggtacttttgtagtataattgcttcaggcttatcttcctctgaccgaggtacaattatctacattcagaacaatgtagcagaaaaatcccaatataacttttcctttgtcatttctgaattcatttggctcttaccttccaattcctctcttatcaagggaaagtaaacatatcctggaattgccaaaggcttgcagaacttagtacaacacatctgtattttacttgctctgtaagaaagtcctttaaaaggagccagtcagactccttgctcagggctaggcttcttcccaaatgccaaggccttctcaaaatctccgaatggaatcactccactcagtcacagatttgaaaaggtcaactatgtgtgagccagcaatgaggaaagaagttactgctcctccaaatgaaagggggtgcttcaatggtggcacatgaagactcagaggcagaaatgccgatttaggaatcaccagaatctcttcatgaggcttcacagtagggtttcctatctagacatgaagcatgttcatcccagctttatttttagagcttaactaaataatagcccaatacttacaacagaacatcctcaaagctcatgagtttatgtgccaccaagtaggctccaaaccggaaacatccagcataggaaaaatacatcattgcctgggtgaaggaaaatgtaattccaaagatgtgtgctttcctcaaagagtttctgaaaagaagacatttgaaaactcattccactttcatttctcagtccttaaaatgtaacttttgataggttggcagtagggcacagaggcatgaccaacaaaaatgggtttcgtttccaaagaactaagtttggtcctcactttacacttaacagttgtgcaaatttgggaaactgcctaacctctgagactcagtgtctttatctttaatgtagaattaactacacctcaaagtgttgatgtaaagagaaaataatccaatgactgtaaagagccggttagggatcaataagtaaaagttatctccctttctccccacttttggacacacagtatggaagtactctacgtaaatattcattctgcacacagttacccaacacctacaaggtgcaggggccatgatgggttgacatagaggaaacaggcatgttcttgacttaggagacctgacttgagttgaattactatttatgcattagaggtgccttatgaataatctgttataggaagaaaggagaagcactaaattcttcgggggtctcagagaaggctttaaaaaggggttgacattctagaatcatgatatggatccagctcagtgatatggaggtgtgggtgggggcaggttagcaagtgggcagccctgggcttccaacccctcctgctaccagatcaactctgcttttaccttcatcacatatgaagatttcaaataatttttttttagacaaaaaggctctaccatcattttttttaaataaaagcttaaaaatccatcaataaagtccagctttccttttattataagaaacagactcagaaaggttgggcttgcttatgttcacaccacttattagagccctcactgggatgactgtattaaaggaagaaggtctgcactggagaaggggtaaaaagcagaaagacaggtaaacccaggaagcaccatcctctctgtgtcccacaggtacctcaaatttcaggttccataaataactcattttcaactagagcaaattatagggtcatatcctacctggacatcagatagtcattctcagcatcatgtctccctcccttctcatcagtgacccattcttacaggttctacctcagagatgtccctgccttagttcagggtcttgtactttctctcctgcataattacaactgtttctcaatggtttaccttcgagcactttctccacttgctccctaccttctagccaaagtaatccctctgaaaacaaatatgatgattgaaaaattattcacactctcctcccactcttcagcggttattacctgtatggtacctgcaaactctgagcatacatatgttcaaacttctgctcctgagtcaaagaaacaacggttcggaagttttctattgcttcagtagcgatctgtaacagacagcaccgatcaccaagaggcacaagagtaaatagtggtgattaatttgaattctataaaacagactaatgaaaataattttatgattacatatttattattatgtatgagcattttctctgtagaaaaagatactaagtaatttatcaaactgagttatggatctggaaggaagattgactaattcaaacttctcctttgcagaaatagaagctaagacttaaatggattatggcattgcttaaagccacacagctttacgtggcttcgcaaaattaaccagagaactcacagtacttctattgcagtgctctttcttctatgatgatcacattttaagttcacagttattttacacttatttttaaaatgtgatgtttatatttttctctttatcattgccatttgtgacaattgaagaatgtttggaaaatagtgaaagaatgcaggcaataaaaagtaaattttagatacattcaaaggcttactcctctctgcctgtggacgcttacccctttctgcccgtggacgccaccaaggaagcatccttaaagtctctctttcccctgccgtcatgtctaagtcagagtctcctaatgagcccaaacagctgaggaaattcttcattggaggttgagctctacattggttgaccaatgagagcctgaggagccattttgagcaatggggaatgctcatggattgcgtggtaatgagagatccaaataccaagcgctcaagggactttgggtttgtcacatatgccactgtggaggaggtggatgcagccatgaatgcaaggccatacaaggtggatggaagagttgtggaaccaaagagagctgtctcaagagaagattctcaaagaccagatgcccacccaactgtgaaaaagatatttgttggtggcattaaagacactgaagaacatcacctaggagattattttgaatagtatggaaaaattgaagtgattgaaatcatgactgaccaaggcagtgataagaaaaggggctttgctttagtaacttttgacgaccatgactccatgggtaagactgtcactgagaaatacccatactgtgaatggccacacttgtgaagttaggaaagccctgtcaaagcaagagatggtgagtgcttcatccagccaaagaggcaaagcagctctgggaactttggtggtggtcgtggaggtagtttcggtgggaatgacaactttggtcgtggaggaaacttcagtggtcattgtggctttggtggcagctgtggtggtggtggatatagtggcagtggggatggctataatggatttggtaatcatggaagcaattttggaggtggtgtaatgattttggcaattacaacaattagttttacattttggacccatgaagggaggaaactttggaggcagaagctctggcccctatgctggtacaggccagtactttgccaaaccatgaaaccaaggtggctatggcagttccagtagcagcagtagctacagcagtggcagaagattttaaattactgccaggaaacaaatcttagcaggagataagagccagagaagtgacagggaagctacagtttacaacagatttgtgaactcagacaagcacagtggtggcagggcctaagtgctacaagaagacatgttttagacaaatactcatgtgtatgggtaaaaaactcgaggactatatttgtgactaattgtgtaacagattcttttagtttctgttctgtggaaagtgtaaagcattacaacaaagggttttaatgtagattttttttggcacccatactgttgattgttaaatgtaatagtctgatcataatgctgaataaatgtgtccttttttttaaaaaaaaagtatattttacacatttccatattgtttttttcctaagtgcataaatatatttaaaaagattggaatgaaactctatatttagctctatatcattatttttaccttcatatcaaaagcattttccaagttcattaaatacacattaataatgagatgtgtaatgagtcctttaatatcataaccaattaagtattcctttattgttgagccaggttttcaattccttttttattaaaaatagtggtgagataaacatctttgtacctaaacatttgtccatattgaattggtttattaggaaaatttcttaaggtgaaattaataagtcaaagaaaactaacttttttttttagaaacggggtcttgctctgttgcccaggctgcagtgcagtggcaattcacaggtgtgatcatcatagctcactgcagcctcacacacctgggtaagcaatcctcctgcctcagtctgccaagtagctaagactacaagcacatggcactacacctggcttgaattaatttttttaattttttaaggaatgtggcacatactatcaatctgttttccagaaagttttgggctgggtatggtggctcatgcctgtaatcccagcagtttgggagatggaggcaggtggatcatttgaagtaaggagtttgagaccagccaccatcaacatggtgaaaccccatctctactaaaaatacaaaaattagctgggcatggtggcacatgccttaatcccatgctactgggaggcagaggaagcgctcgaactggcgagacagagattgcagtgagtcaagatggcgtcactgcactctagcctgggcaacagagtgagactccatcttaaaaagaaagtttccatcattcaattatgttgtaatcaaatgttacttccaacaaggcaatctgattaggaaacatacatccttcatcacctctggagtctgagtaaagggatatggaaaaagcaaagaacaccagtgtacaagatgagatttcagcctacatcagccgcaccaccttgaaccaacatgctgtctcattttcctcatttgcaaaatgaggacgatggactagagggtctctaaagtcccttttaatgctatgattttaagagaaataacttccagaattataagtcaccaagagaaatgactctttattgtttaagatgttcttcctctctttggcctctgcactggtcagaacagattctaataaagacacatttaatttagagtgttttatagcttaaaatcataaacatggaattccacttattcttcactgaatcttacataaattacctaacttcaaacataacagcaagcatttcataagacattaagtcagttttgaagactaatatcaaaatctatcagaagtaaaaaaaaaaattagtaacattcttagaaacaaaaacttatttaaaaataaaatttaaaatattattcttacactgacaggccaagaagattgaattatgtttaccacaagatacttagaaaattaggaaaatggcaggtttattttaaaatattgtataaacttcttttacacattataaaaatgatatatagtcactttagaaaatcgtaaaagtgcagaaagcaaaaggtgaggagaaaaaattcaccttcaaattcccaaagacaatccttttgtcagacacattagaaccatcattctcagcaaactatcgcaaggacaaaaaaccaaacaccgtatgttctcactcataggtgggaactgaacaatgagaacacatggacacaggaagcggaacatcacacactggggcctgttgtggggtagagggaaggggggagggatagcattaggagatatacctaatgttaaatgacgagttggtgggtacagcacaccaacatggcacatgtatacatatgtaactaacctgcacgttgtgtacatgtatcctaaaacttaaagtataataaaaataaaaaaataaaataaaagctgaagtttcacaagcaaaaaaaaaaagaaatatttctaattatcagaattctaacaaacaggttttctagattagtaagaaaattcaacagactataacaatgtctgctgaaaaacagattttactgtatatttcagtgtaatggttttaagaaatattttctgtgcaccatgttctaaggcaggagtgtctggtctgagattggtttgtaaatgtcattgctttttagtgtgtatatagccgaataaaagtgggagtttgagtcacagacctaaaagtggtgagtaaaacagtataataacttcaggactgtcttcatcttgacgcacaatgaagcaattaggaaaaggcttaattagcaccccgcatcctcacagctttgtttattccaagagttttaaatggagactcagtaatcaccatcaggagagagaatttctaatccaagaacaaatagcatcgagtttccctcggaaactgttgtgtactaaataattttgaagaaataaaaatgtatgtttctagaaagaaaaaatagcctcctgacattactcttcctaccctcaaataaacaagtttatggcttttatttctgaaaagtaaaaaagcatctacaatggagccttggacaacatgggggttagggagactgacccctcgtgcagttgaaaattcacatataacttctgactccccagaaacttaactactaatagcctgctgtcaaccagaagtcttaccaataacataaacagtcaattaacatgtattttgtatgttatatgtaatacatatttgtatttttataataaagtaagctagagggaagaaaatgttattaagaaaatcacaaggaagagaaaatatatttactattcattaagcggaagtggatcatttaaaggtctttatcttcatcatctttatattgaataggctaaggaaaaggaggaagaagagggattggtcttgctgtctcaggggtggcagaggggaagaggcagaggaagtggaaggggaggcgggaaaggcaggcacacctggtgtgactgacatgcattgtggtctctgtctgactttttccttttttatttctctaaaaatgtttcaatatggtaccaatccttcctccactgtttgcttcagtttcagtgcctgtatcacagaagggtccatgtcataaaagaagttaaaagcagtcctgaataaccgaaactcttttgccagattgcgtaaagttagttttctggcactgcttctcctatatcttcttccgcattgtttggcagtggtttggaaacactcatctttatcaagtcatcttctgttaattcctctggtgtgatgtttatttgctcttgaggttctccaaaatctataccttgaaagccttcacccaccacctttttttttttttcatatctcctatttctttttgtggtttccttgattggctctgtcataaatcctgtgaaatcatgtacatctggacacagttttctccagcagaaatttatcgttttaggattacagacttgcatgatgttcttctctctggtggctctctaccatagcattaacaatcctttctgtagagtaccatgtgctttgtgatgagccttaaaaatccttatgagtggcgaggcacagtggctcccacctgtaatcctagcactttgggagactaaggcaggaggatcgcttgagctcaggagttcgagaccagcccaggcaacacagtgagacctcatgtctacaaaaaatttattaaaaaaaaaaagattcttataaccccctcatctaaaggctgaattagagacatgtttaggaggcaagcagaccacttcaatacctttgatgttaaactcatgggttctgggtggccaggagcattgtctaatatcaaaagaactttaaaaggcagtccgttactgtctaagtactttctgacttcaagaacaaagaaagcatcaatgtaaccaatccggaaaaagtgctctcattgtccatgccttcttgttgtacaaccaaaatactggcagctgaggcttatcttttcccttcaaggatcagggatgaacagctttacacataagagcatatctatagatatggactcatcctaaaccggattgcatttatacaaaacagtagagttagcctactcctttctgacataaatccttggacttgcttctcttccttattaataaaagtcctttgtggcattttttttttctaaaatagggcactttcgactgcattaaaaaccttttcaggcagatatcctttcttctcaatgattttttttaatagcatctaggaacatttctgctgcctcttgattggcagaagctccttctcctgctatcttgacatttttttaaagccaaatatctttctaaaattatcaaaccatcctttgctggcattaaatgacccagctctgatccttaatcttacttttaatttgaattgactttgcttttcctctaatcatattagagtctataggtatgcctttctcacagcaatcctgcacccatgtgaaagctgcattttcaatatgagataaatgtattgtacaaaaagtgcaaggtttttgcacctgctgttgtagctgcagtgatggcttttacgaattttgtttttgttttgttttgttttcttttacaatggttcttatgctagattcatttatcttgaaatggcaggcaactaactgcagctgcagacctcacatctatagtatgtatcaagcagttcaactttttcctgtaatgtcatgacttttctctgcttgttgggagcacttccagcaacactagtgtcacttgatatgggttccctggtgttatttaatgtttatggtattgcactaaacatgatttttaaaatacgcaagaatcatgagagatcactttttattgcaatatgcaatttactggagagatgaactgctcctgctgagattgttagtgtcactgcattttaagcaggtacaacacttgaactcactgcagtagcaacaggaagtggctacaaaattactggggtagtacagtacatactatggttttattttatgatttaacactatgtattagtctgttctcatgctgctaataaagacatgcccaagattgggtaatttataaaggaaagaggtttaatggactcacagttccacatagctggggaggcctcacaatcatggcggaagatgaaggaagagcagagggacatctcacatggcagcaggcaagacagcatatgcaggggaactcccctttataaaatcatcagatctcatgagacttattcactatcatgagaatagcatgggaaaaacccactcccaggattcatttacctcccactgggaccctcccataacatgtgaagattattaccattcaaggtgagatttggatgaggacacagagccaaaacatgtaacactgtatctttacagttgttgacatgtgtcttgactgtgaatggtgacttatatggtctgtaagtgtttgtgtgcataaaatttgatcacttttaactttttttaattataggtttgtgtatatcttatggtagtaaataataagacgagtaactacatatattttatgcatttataacatacttaactttttcttaattttttgatatttctaggctacatggcttgtgagttttttcaaattgttgcaagtcttcaaaaaattttccaatacatttattgaaaaaaacctacatataagtggacccactcagttcaaacccgtgctgttcaagggtcacctgtattttataaaaatgctcactagtccacaataatgtgctgaaaaactgcagagcacagatcacaggcagggtagaggttatgagcaggttttgacatcatgcagtcagaataagtgtgggctctaatgtcacatacaccattaatcaataaacaaatggtacaccattaaccaataaacaaagaaataggaaagaaacatcaagggctgcgaagtatcatgaattaattcaggtgtcaggaatggcctctctgaagaggtaataattttgggatatgaataacgtaaagtcagccaagagaagagcagaggcaatcagcttaaaacattccaggaattgcaagaatgcccactgggccagggcacacaggcataagagactgtgatgccagataaggccataaaggtcatcaggagttagatcatacagagtttggtaatccatgataaaagattagattttgttccaagtatgatcagaagccatttgggagttttaagtaagggttggcattattagatttttatttatgagaggtcagaatgacttctgtaagaatgtagactatagttggataagaatggaagaagttgaagcagggagattggttaggaggctgttgctgtgtgactgtgagcaagttacttgatctctctgaatcttgggtttcattatctatccaacagggataattcaacagggttattgacagcattaaattagatcaagtatttagagctgttagaatgatacttgttatataagaagtactaaatagcagcttgagaagtgtgttcaggtggaagttgattttcaatattatgtggactggttggtgcagatccactactttccctacctacttctgtccctctcatgagccacccctgaattagaaaatgtatcacatccctgacctttgctcagaaaatctgccatatccacacataattcatttccatctgctccccttcctttggcccctctgacagaactccaagagtcttaaatctcatgtgtcacttcaaaggtgctaacctgtggtttgcatgaattagcttaggatcagattgtatcatcttcttcctaaaagcaatctaagactcccttctgggacatttcaaatacctcattaaataatgacactgttaactagaatgctttctcctttttttatattttgtcctagatttttccatcttctcaggggaagagtcaacaccatgggggagacccccaaagtacaatattaaaggaagtcattggcacagaatgtattccctggcaggggccaacgttacttgagccagaccacaatagaaccctgtgggtcagcaccatcctgatgtacctccagaaataggcctccgggagcctgataggatgcctcgcatgaggtttgtcccctacagacactggctggggaggtactacagctggcccaaaagattttccagagggaaccccccaaaaatgggataaagagtctgaagagatagcagagaggtaaaggacaaagcattagtggcaatgaccaacatctggggccttcttcatcattcacttggtgaggtagctgggcctactgacaaccagagccactctgatctgtgtgagtccctgccctaactcctgggaatctcagaatgttcatcacacatatatccctgtcctaaatgttagttatggcagtcagccctgctctgacctctcatttccactatgatacagatcatgtgatatcagactgcattctgccatcagaggaactctttgttttataacagaaagagaaacaactttggagcacaactgtctgagcttgaatcccagctccaagacctatcagctctaaagtccagagccatgacctgcctgtgcctcagccccactagaaaaatgagataatagaccccatatggttgctataaggaataagacatttgcctggaaacacagtaaatgccacataagcatttgttaaataatgggaaaaaaaagacaagtatgcaggggaaaaaaaagaagtaaaaaaagggtaaagataaacagaaataggatgaagggaggagcatgataaaaaaaaagaaagagtggtagtaatttaaaacagatataataaatacccctagcatttttccatatttaatctcccccctcacatgtacaaataaaatgggcttactttcctcaataaaggaatggatttaagcttgaaagaaaagaaagaaagcaagaaagcaagaaagcaagaaagcaagaaagcaagaaagcaagaaagaaagaaagaaagaaagaaagaaagaaagaaaagaaagaaaaagaaaagaaggaagaagggaaggaaggaaaaaaggaaagaaaagaaggaaagaaggaaggaaggaaagaaggaaggaaggagtggagagagagtgaaagtgagagaaaagaaagaagaaaataactaagggaaggaggaaagtggggaggaaggaagaacagtgtgaagacaatggcctgaaaactgaaaaagtctgttaaagttaattatcagtttttgagtccaagaactggctttgctactttctgtaagtttctaatttactgaataagcatgaaaaagattgctttgaggaatggttataaacacattcttagagcatagtaagcagtagggagtaacaaaataacactgattagaatactttactctacttaattaatcaatcatatttagtttgactcaccttcccagaaccttctagttctttcttatctttcagtgcttgtccagacaacattttcatttcaacaactcctgctattgcaatgatgggtacaattgctaagagtaacagtgttagttgccaaccatagatgaaggatataattattcctgtcccaagatttgctatattctgggtaattacagcaagcctggaacctatagcctgcaaaacaaaacaaattagagaaattttaaaaatattatcttcacaactcatgcttctattttctgaaaactcaccttcatgagactatattcattattttatcagtaatgaactaaaaagtaaaggtctacttgtaagtttattgagtttctacagtaagaatttccatgacttcagaatgctgaaagtagaatatcaacaatctagagttcaattacatattcctatctctttggatcttttaataccaagaaaaccttcattaatcacggcaacattactaaagcaatatctgcaaattagcaagataaaggagtctgacaaactaggaatgatggaaatttccaatgttaggtatattattatttgtaatttaagcctaacgtttgtcattaataatattcaaatatatctgggtctgtttgagatataatgtttaatttggaaaaaatacagagctgaaaattatggaatttaatttaagatagtaagcgcgcattattatcttccccttgaattccagagggagtctgaagcatgactttcactagtgtgcactgagttccagctctaaagccagaagtcaaactgcaaagtgaatttaatccaccactgtataatgtccaactgtaaaccagatttccaactctgaaaccaaaagtcaagctacaaagtcagtttagtccatcactctataatttagtccagcacatctcctctaccctggaaatattctgtgccctcaagccattccaaatgcctgccctggccccagacctgccttttctgaaaaggggctgggtaaaataaggctgagatctactgggctacattcccaggaggttaggcattctaagtcacaggatgcgacaggaggtcagcacaagatacaggtcgctaagaccttgctgataaaacaagctgtggtaaagaagccagccaaatcctaccaaaatcaagatggtgacaaaagtgacctctggttgttctcactgctcattatacgctaattataatgtattagcatgctcaaagacacaccagcgccatgacaatttacaaatgccatggcaacgttaccctatatggtctaaaaatgggaggaaccctcagttctgagaagagcccaccccttttcctaggaaactcatgaataatccaccccttgtttagcatgtaatcaagaagtaacaataagtataagcagctgagcatcccatgctgctgttctgcctatgaagtagctattcttaattttttcactttcttaataaacttgctttcactttactctgtggattcgccttgaattctttcttgtacaagatccaagaaccctctttcaaggtctgcatcgggacccctttctagtaacaatagaatcctttataattccctacattaatccctacaaaatcatttaacacctgtctgatataaacaccagactagtatttaggaaaagagtgctataactatcagtagcctttaaatacattaaattccataccatggagctgcaccagggctgaaagaggtatcataaataatagaacacctgtatattttgttgatgcaatcattgagcttatattaaagggatgatttgccaaatttgggataaatcagactggaatggttttcaaagccagctctctgcatttcacatctttagtttgaaggtcaaaggatgcaagctggagaacggctgtggcacagggatgatataagttgctcctgttctcagtatctacaagttctactcagagctcatttcccactgcagctactgacttatgggcttgtgagagaagctcttagaatatcacctagaatcacttctaggtgtgagttcatggcagaggaattacctggctatttaacttttcagacatataaatgtgcagctttggatagtagtgaagggccacagaaataaataagatggatcaaagatggcaaattctttaatgtaccaaaaagagtaactaagaagtctaagaccttaaactgcaaggagatttaacccctcggcttcatttgatttagcacttcagacattacactgattactattcctttattctgaagattaacactcactgtcctacatctatttctacagagtaggagtctatagaaatatggggactaagaagaatggaagagcacagattagtagccagaaaattttcattgtaaagactagggttgaggggaggaactaaaacccgtcagccaaaaacaggtcagctagtggtgtaaagtagatccaacagtcctctctcagtcaatctgtgataacagctacattgggctttcctaggttgacaatgtttgccaacctgctcatttcctcttccctggtctttcctttttagccactgttttaagttctggaaaacagttttgcttgagtggctcatataaggtgagtgcagccatcttggcagggccaagtttgaggtgtctttgaggaaacaagtgaaaagcagaaggttgaccccagcaggcaattagagacagtgaatatggcaaagggcctcacaaacagcactatggagggaaaaagtgaccaccaattttacaaatataggaactcactgtggcctaaggcaggtcataacaccagaggaatttgagaggcaggaagaaaaactgcaatacagaatgccctgaatacatctgctctgggttctgctgcaaaagactgagttgcctccaggattgtgtcttccacgtcaaatgtgatgcgggatatttgtccatcaaagcacatgagcccataccacagggtctgtgtcatattgtgcaatgtcacattgcactggttactgttcctttattccaaagactaatgctcactgtctcatgtatattcctcctacagagtaggagtctatagagttgtgaggaccaaaatgaatggagaagcatagtaaaacttatttagtaaaccaattataaaaaaggtttactaaagttagcagtgcaaatttcagccttcttgacatctacatatggatgtctaatacagacgtcacaaacttaccatgtctcatacagaactctccattctcccccaagcctgcttctccaacaggcttctgaatttcataaagatcaactccagctgggcatggcagctcacacctgtaatctcaacactttgggaggctgaggcagggaggatcacttgagcccaggagttcaagaccagactgggcaacatagggagaccctgtctctacaaaaaatttaaaaattagctcgacatggtggtgcacacctgtggtcccagctaccaggaaggctgagaagggaggattgcttgagcccatgagttctaggttatagtgagctgtaatcatgccactgcagtctggcctgggctacaaagagagaccctgtctctttaaaaaaaaaaaaaaaaaaaaaaactccatttttttttccactgtgcaggtaaaagaatttggagtcatctttaaataccctttctctcatatccatcatcttatccaaccaacacattgttggctgtacatctaaaatatatccagaattaattatatcttatagccttttgtataaccaaattagtctaaaacactatcatctcctcctggattactgcaacagactccttctatgcttgcccccttcggcctattcacacagtttctatagtgatcctttcaaaatttcagatcatgtcacttctgtgttcaaaaccctacagtggttttccatctacttctggatataatgctgaccttaacacacttatgactcttcttttcactcactttattccagccactctgtcttctttgcattttttttttttttgagacatagtcttgctttgtcacccaggctggagtgcagtggtgcaatctcagctctgcaacctccacctcctgagttcaagtaattctcgtacctcagcctcccgagtagctgggattacaggcgtgcacctgtaattacattctatacaacttgatctaaaccttgtttttattgttttgtttgctttaggcaaagaagtttgtattaaaacaacaattactaagaggagctggtactatgccttctgaaactattccaaacaatagaaaaagagggactcctaaggtttatatttcaacgttataactctatgtatttcctcatttatagcttaatttattcttaaagaagccccatatattagatagaagaaatgttagtatagtactaacttacagaaaagatttaaagataaagatggataaggttcaagaggggaaaagacacaccagagattacatgaattttttcaaattctacatcattttgtggacttttgccataaacagttgtagaagaaattgtcacttcagccaaaaatcaaaacctgctggttcaatagtatctagttatatcaagagattcatacagtagcaaaatttaagttattaaaattattaaagtttaaagttattaaagataaagactgaagttattctattcttgccttaattttttaatgtgcttttcatttccttcaacctatattttagaggattgtcttccctcccttctgtaaccatagtgactctaaactttcttacagcaattaaatacatcctttcttcagtagcaattactgttttatgttgattgagcactttatactctcttttctaaataactattctacatgcatcttgttaatagcatgaataacagcaatagcaaatggtttataagttatctatatgctctacagtatataatgtttaaatagttaacatgttgctacaaaaagcatgtgatatattcgtaggttagatatttattcaacattttcttaatgatgataactaacacccgtaaggagaaaattagtttcatgctggggtccaaaatggccaattaagacaaacaccagtagaaaggaggcacgtacccctttaacttgagcagcatcattggcgagcctggtagtcaatgctccagtggtgtttttagggtcatcaaaccaactcacatcctgtggcacagaaaatgattttattaccttaaagctgtttatgagactctcagctccaagagggcagcgatggggtcagttttgtttatacttataccccctgcatttagtactcaggatgtgacattcaatacacaagaaagaaacttaatataaaaacacataaatagatcatttcatttgtcagaaaaatttctgagtgcctactttctcctacgcatgatttctaagtgttggacctgtacgaacaaaaaagacaaagtagctgctttcatgaagtttagattctagagatggaaggtacaaataaaagaaaaattgagcagggtaagaagaacagaaaagtgaggggaggtgctattttagagactggggaggggaaacagaaggcctttctaaggggacatctgaacagaggcctgaatgaaggaaaggatgagaatacctcagggaaagcagaaacagcatgtgcaaagaccctgaggcaaaggcatacctaatctgttcatacaccagcaagaaagccttaaaggctgccagcagcctaaaaagaacctttgtatgaatttgtaaaagccacccccttcctctggacagatttgtgttctgatttggctcctctgatcctcccctcccctactcttgggcagtgagccactgtttatggagtagacggtgtattggaaaaaggcggttataggagatgagatttgagagagagtgggggccacatagtgtatggtcttacaggcgactgtcaagattccagactttaccctgtgagctacaggcagccttcagcaggtttgggcagtgggatatgatttgatttctattttagaaaaatgactgtggctgtttttaggtgaatctacaggattgggataaaaatggaggtagggagatcagttaggaagcttttgcaatgttaacagaaagagaagagtcaaagatggcttcaaggtttttagcccaaacaactagtagaacggagctgtcgcttactgatataggggaagagtgggtaaggaataaggctggtggggaggggaagagtcaaaagctccattttggaaatgttaaacagtgaaactcttattagacatccaatagagaggttgaataagcagttagataaatgtagctcagggcagtataagtgatttgagtcaaaaacaaatcagcaaaagtaatccagattaaaatataacattcaacataaaataagattttctttgtaaaaccatttatatttttaaatacacagatactaacatgattgtgaatttgaagtatgaatttatatgttttacaaataactgtggtccctaagaagttatctaaactggttatttacattaaagaagtatctatcatttttcccaaaaatatttaagaaaaaatagtgctataatttattatagtatgtatcaacttgcttttcaatattcttaagtggttaaaagtgtctccacacaggaatgtaacttccttgaacacagggaccattcaggtttgaatgccttacaatactaagtactagaccttgtaagcagaaggcacttaataaatgcttgccctacttaacaatttatggaggagacattccacaaaccatcagctcagctgccaaagtataatgggcacagcagttggcctggaggctggttgggtaatgggaaatttggccctggagcaaggtcagtgtagacctaagtggaatctgacttataaatacagttcgacctgacagtccaaggacagggtttcccatcaaactgtgctctctcacttagattcagtcctggctctgtcagtcactagctagcaattcccataaatacattttctttctaaatggtgatgggaggaatggggaagaactgaggaaccagagacagctggtaaaatgtgaatgccctctagaaagcctaacacaccaaactgatgcctcttagccagggttcgagtacccctggcacatctggggcagacttctaaagcatcattttactcaatggcaagtgattagtgatttttaaaacggaaagttattaggtcacatacaaaattttcatgattgttaaaggaactttcccctttgaaccaggctgctctgagttacattcctctaatttccttccccatttccccaggaaaacattcacacgtgtcaatggttagggttttgaagctgcaaaatgtgagaagcattccattaaacccattatcagccagtaacactgcagcttgaactagtatttcagactagcctcagaaaagaaaatgggcagtgaagaacaggacacagggatgagttttgatttgcggaaagaaagagtacagagggcatctcttggtgggaagaaacactcgtgccctgggtttgccaggagaaagaaggaaagagaggaaagggatgaggggtatcaaagatgccttctgcctgcactgcccaccactgctgagacacaggctggaggtgaatccacgctggaggctctgtctcaaactggtccagttccttgtgcccacccagacctgacagacagtagagcctcatctgtgcctagtgggcggttcaaccgcatctctgacgtgagactgagggacaaccaatataggagctaggcctgggaaacatgacagagctcccactgtctgagtccaaggggcacacatggggagttctacacatcccagggcacagccctcgatagacatacctgtctgagcatggatcggaaaaccatgtatcggagccgcttggtgaggatctctccagctttgccaaatgtgaaaccctgtgggcaggaacataccttgtcagggacccagccaccatttaaataaaaggagggagaattgatgtctttgctaaagcaggagatcagacaaagtcagaaagcctgatttcaagggcttgctatgtttctgtgactgtgtgccatggcacaaggctgtacgggtggtgtagacagaaaagcccactttacagaagaaactgaggcttagagagcctgataagatccatagcccacagttataaggtcacagagttggaatcttaatccagatgcatgagaatcctaaccagaatgggaatccagagcctgagcttttaattacccactggactccctccccatgttactaagatgaggagttgggtggtctaacatctttaggcattttgctatctctagacttctaaggtcctataactcatagactttgttctcacctgttttctaggcaagctaggttccagtccccccaagcaccatgttatgaaggtagtcctctaacttcttttgcttcaccaattcaaatcgtcaacatttaagggaccagctcaaagcccacctcactccaactttcttaaccaaatttacattgagcaatctttacctcctccaaacacctgtggtattaatagttggtatggcaatcctataagtagttagagtgtcacatttattctagtaaggtcaaattccccagtgaggctgtaagtactcagtaaagaaagaattcagtctgttttttcttttgcacctcttataatgtccagaaaaatattctattttttaaaaatgtaatacatgcttacatgttaaataaagagatctagtcacagttttatctttaaaaattacaggtggctaatcattcaattaataagtgattacctactactgcctcatgcaggcctgagcacttggtcacatgatccttttaatcatcaagaggcaggtacctgcatccctagtttaccgctaaggaaacagaggcttagacagtttacttatgtgcccaaggacacaaaatcagaaacaggtacaaggagcacttgaaccaaaaccaatactgtcttgccataccaaacagtatttatttatttatttatttatttagagacagggactcactctgttgcccaggctggagtgcagtggcacgatcatggctcacagcaacctcctcctcctggcctcctgggttcctgagacatttcctgcttcagcctactgagtagctgagactacaggtgtggatcaccacgccctgttaatttttgtatttttagcggagacagagttccgccatgttggccagtctggtctcaaactcctgacctcaggtgatccactcacctcggcctcccaaagtgctgggattacaggcataagccaccacacctggccctcatactaaacttttagagtacttaattccttgccatttcatttcagccaaatgatttgcaagctgtaaaaatctgactctttacaaatgtttcctacattttttgttggaggattgacattcttccatcactgaaatgattctttctccttgaacaaaagttgaacgataaactcttcaaaccctttttaaacccatgtgacccgcttatggggttttgtttgtttgttgttgcttttagaacacgggaagacatttctttgagtatttacatttactggcaatacttatatccaaacttacatccagggctcccccacaccccattttgaagtccctgcctttcacctccaatcatcatatcaggccaaatactctgttccccctggtttcattgcgggaggtaagggtggagaggagaaggtaagcaagggagccagaggaggcaaacatcttttttcactatgtcagaaaaacttggctgttagtagccatgttaatagagaagttctactaaaaggccaattacactgatgtttataaatccccccagttgaataatgatgcatttctcaaaatgaatatagtgaaaatggaaacatttacctgaaggaaaaatgtaataaaagaaataattccaagggctagaaacaatagtgaaaacaagttactattctgtcgttttgtttcaggatcatcaattcttgtaaaaacctgtgagaaaacatttaaaggatttttagttcaatcagtgaagaacccatcctggacctgacccatttcccatctggcccagtattcaggggtcaggagagccttagtacgctggaaattggggttggctttcctattgccagccttaaaggtgtctgcattctcccttctgtggaggccaaggataggtctatcattcataaattgatccagtattttttctgttcggattccctcttggagtcatgagtgccacctcaactgtgtaaagttgaaatcagaacaaatactctcctcttcccttggtggggaactacatttatggcagttcattgctttactatttggacatttcaaactgtcccaaggtgtctggggaaaacctgatgtggttttttggtgaaccacagagtggtggtcattcactcagcccaggcctttcaaaaagaaaggaatttccttgagcctgccttcttggtaggatggccagttaagagagccagttggaaactacagctacctgacctagcaccatacctgaaattttttccagagatagttataagggctaataggatgttttggactcaaggaacacagaggataaccattcctcagggaaagaaaacacgtatctcccttcacagtgggccaaaatcagtcttgtaagatagtaacattcctagcccaggacagacaactttatccttcataaaaaaacaaacaaataacaacaacaacaaggatttttgaagagattaaataattttttttgactagtcagtccaacaaaaatcataacaattaccaaattcttactctatgccaggcattattctaagcaaattcatatatactattcctctaatcctggcaactatctccagaagtatgatttattatcatcacggttttacacagatagaaactgaagtacagagaaggtaattaatttgctcaagttaacacagccagcaagggatgactcaaggatataaatccaggcaatccgatgcagagcccactatcttcaatgaggcagatgtctggttgcctactcaatatctaagagctaatatcccagccctgggtcacttacctccagacttattgtcatatgaagaatgagaaaagtataaaatcataagttgaggttttgttacaaccaaacccattcctaacttaaccatttcctttttttttttttctctgatgacaccacagtctacccccgccaacccccaaaacctgcaagacacatgttagtgcaagaatcagcaaactatgggccactggccaaatgtttatataaagttttaatggaacacagtcgtgttcattcatttccacattgctgttgtgtactactaggtcagagttgagtatctgcaacagaaatcatgtggcatgcaaagcctaaaatatttaccatcttactgttaatagaaaaagtttgctgactcctgccctggaccatatactctacagaatcagacatttgatcacattctcggaattttttcaacaactagaaaaatacctggcacagagcagacacaaaaaataattctagaggccaggcatggcagctcatgccagtaggtggattacttgaggttaggagttcaagaccaccctggccaacatggtgaagtcctatctctactaaaaatacaaaaattagccaggcatggtggtgcaggcctataatcccagctacacaggaggctgaggcaggagaatcgcttgaacccaggaggcagaggctgcagtgagccgagttcgcaccactgcactctagcctgggcgagagtgagcgagactcaaaaaataataacaattcttgaataaatatatttaatattaagcatgaatgtcattaaacatgaattcatgaatgaatatattaaactgaaataagctaaccaggcatgagtagacctgaatagtcatatatattttgtagaatcaaaagtcagtgtttagcttatgcttcttgtggtgatcaatctctttctccacaatgttttcagcagttatggcaagggtgtcctcagcttgatgtttggacatatgtcactaaacagagagcattcctttcagattgtaactttactgttgaaaatgccaccattaagatgaggtggaactaacacatgtcaacctcaatctttaggaagccgttcctatttgttttaatcttagcaagtgggatgaaaattacatcttacaaaagaagcatgctaggcttactcacatcctggaaagtatgtatgttagagaacagtgcattctcaagccagcctgacaaacatttgaggaactctctttgcacattggtgaaatgaaagttcacaagatttgttcagagccaaatgttggcaggtatgagaaagtcatctcatcactttcattgactatttcaggaagctggtctttagttgcccaggttagaaaccaactgtgatgacaaaggaaggttcacaaagttagctctcctatcacaaaccagactgctattcttacatcttcaagccaattagtttcatatggagatacgtggattttgttgtttttgtatcccagttcagacacaagcactttattcgttcattcttccatcaggattcacaagtaaatcacacaaatgggcatcacacttacccctataatctttgaaaatattattgcaaatgctggttgcaggcctccatttataatggcacaaaatacaccaacaacaaaataaggccattcagttaaatttagcttcataatcctccaaaaggaaactggaggtatactttcatcctagaaaacacaaattattacaacaggctagttaaaaacttttatatgtacaattcttacatacgcacaaaaattagtaaaggaatatatcctatccttattccttatcaatgaataagtgatgacaattttgctttaaaaaatgtcatagtgattattatttagcttcaaaaaaatgttgacaaattttgctacaatactcctttattttttaaaaaataaatgatgtttccacaaacacttacttttatttggtactcagaacctgacaagagtatttataagcaggagtaaacagaatggaaattttgatatttgaagacccgctatagtctctttacactataaattttaattctaaaaattctgctgtgtaaattaatacttttaaattctaacctgattctaaaatgttgacattctgggggataggacaggaggattctggataacctctcttgttcccactcctactgtagccctagcccaccaaactagggaaccacagttagtgagattaaaacaaactccgcatctcccttcataccagagcctctttggtactaagctttctgtcttgggcttgtgatccacggacactcctacgagttgatctttttcttattagactggatcttgaatcatttgaagacatttccaaggcatcaatttcacttttggattcatcagctgcattttctaattcaacttcatttcctgctgtctaaaataaataagaaatatgcaaaagctcattaggctgtgtgttaaccaatgaaagctaatcactgaatgtcagctatcaaggaaaacagcaatttgtttagtaactgcagaaaaggataaagctaatctgctgtgttgttttatgtgtgtctgtgtgtgtctgtgtgtgtgtgtgatatttgaaaacgaaaaccaccaaagaagaattcccactgcatatactgaaataatctggcattcattccatgtatcttatcttctcacgccattttttgtgggtgttttgactcaatcaagtttactctggatcagtgctttcaacagaaatatggcacaagccatgctatgagccatgttattttaaattttctagaagccatgttaacaaatgtaaaaagaaagaagtgaaattaattttagttatatattttatttcacctaatatatccaatatattattgatatcccatgatatcgtttcaacatgtaatcaatataaaaattgagatattttgcattttttgtactaagtcttcagaacaagatgtgcacactctacttaaaacattccaattcagattcactaccatttaaatgctgtacagacacatgtggctactgactactataacggataactcaccttgaaaccttttaatttttttatctgtttatccttctttattttcccctctttcaagagagaaaaaaaatcttaaacactggtctcatcctgaatcccccaggtgttgtttcctactttgtaaggtaatcaaatcaaataatatttatttttagcattaaatgcaaaatcagtttatcactgagatgacttaggaaaattctgaagttaaactatacctgcattgtgacaagtttgaagtaaatgcctttctctttcatgagttcatcatgatttcctttctccacaatgactccatcatcgaaaccagcgatgacgtcagcattacgaactgtagacaaacgatgagctatcacaatggtggtccgaccttttctggcctaaagagagagaaatttggtttttgaatacattaacaattacctgaagaaacttaaccattcaacatatatttactgaaccaatgctgtgggcattgtaaaaccatcaaatctatataagatagcctctgacttcaataaatgtatagacaattgataatagttaaaaatgatgtttccttgtaataaatacaaacacaaatataacagtcacatattaatattatgtaagcccccaaatattttatttaacctaaatttgcagtaataatcaggggcttgggccgggcgtggtggctcacgcctgtaatcccagcactttgggaggccaaggtgggtggatcacaaggtcaggagatcaagaccatcctggctaacacagtgaaaccccatctctactaaaaatacaaaaaattagctgggcatggtggcgggtgcctgtagtccccgctacttgggaggtggagcttgcagtgagccaagatcgcaccactgcactccagcctgggtgacagagtgagactccatctcaaaaaaaaaaaataaaaaataaaaaaataataataatcaggggcttgtacaaaccaacaaattcctacagaccaggcgttggccaatcaaaacaaacacaggccattgtgctgtactgatacacaccggctagtaatcagccctaggaattataatatcctatcccgcatgaccccctggatgaacaagacagacaataaatgtgaggcagcaaagtccagacctcaatgtcacactgacctgaaataaatttatgaatttattttatccaataaaatattttatccaaggaaactgtgtgagactcaatttattcatatgtaaaatggggataataatagtatttacttcttagagtagttgtgatgactaaataaaataaagcacataaagtactcaacactgtgccttatccatagttagtgatacttattcctaggttgaagaattatggaaaaattgaagagtcacgtaagtctcttttattttcataaaggaacagagccagatatccaggccttgtctgagacttctctaacctttgtaactttcccaatgctcataatttttgttactctatatgtctctctaataactagcaatacaattctcaaaaccaacacacaacattttcaggatccataggataagtagaagtggaaaacttcaaaaagaaaaaatacacaaggaaaaattaggtggtagaaactagaaaatacagaagaaaatagatcaatttttgtatctttttaagaaaaaaggggtatgtggaatttcccctcaaaatttacaccctaaagtattttaaaatataaccttttaaaattgtttttatttataatttaatacatagtttcactatagattaataaggaaacacagataagcaaaccagtaagcagtggctcactcctgtaattccagcactttgggaggctgaggcgggaggattgcttgagcccaggagtctgagaccagtcggggcaagatagtgagacctcatctctacaaatatatcaaaaaatagctgggggctgggcacggtagctcacgcgtgtaatcccagcactttgggaggccgaggcaggtggatcacctgaggtcaggagttcaagaccagcgtgggccacatgacgaaaccctgtctttactaaaaatacaaaaattagccaggtgtggcggtgcatgcctgtaatcctagctactcaggaggctgaggcaggaggcagaggttgcagtgagccaagattgtcccactgcactccagcctgggcgacagagcgagactccatctcaaaaaaaaaaaaaaaaaaaaaaccttggcatggtggcacacacctgtggtcccagctacttgtgaggctgaggtgggaggatcacttgagactgggcagcagaggttgtagtggccatgatggcacaactgcacttcagcctggtgacagagtgagaaaagaaacaagaaaagaaaagataagataagataagaaaagaaaagacaggagaggagaggaagagaagagaagagaaaaaagaaaagaaaagggaggggaggggatgggaggggagggaaggggagggaagggaaggggagggaagggaaggggagggaaaggaagggaagggaagggaaaggaagggaagggaagggaaaggaagggaagggaagggaaaggaagggaagggaagggaaagaaagggaagggaagggaaaggaaatgaaaggaagggaaggtcaggaaaggaaaggaaagaaaggaaaggaagaggaagagcaagagagggagggattgagggagggagggaaggaaggaaggaaggaaataaagaaagaaaaagaaaaacacagagatgaaatcacagattaagcaaaatgaggggaaaaatagtaaccagaatcccatcggcctctattttggttcacagaatgtttagtaagctgctttttttctctctcaaaaatttattaagcacattgacaggatgttaaggaacattcaagtgttgttttattagagacagggagagttgaaacaaatatgagttcatctttgaattctactgtgacatctcaacttggaacacctttggttataatgtctccatctccacattctcggtcctcacagaattatccccgttactatcacgtgctggagatcaaaggcacagtgcccggcacacggcaaacactcaaatgctatttggtgaatgagtcatatggactccagaattgcaggacagtcaaactctgttgatagtcaataacctgtcatggcttaggtaggttttcagtatcacaggctatctgcccctttcctggaaataagaggtttcttatttcgcatagagtcttcaagtggcattcaacacctggaaaattatatatggaccttcaggttgtatttttctcttcttggcaatattacaaactctcaaaacctaaataacagggttatccacatagtcaagttttgaagatcacaatgaagatgaactttcacatgtgtctatatttctattttttaatttaaaagattagcaagtgtcttcaaatgaaaatgtattcatcaacatttaaaataagatcagagaaataaatagaaattgaacaataaaacaaacaaatagaaaaagatttcaaagaggcccaatgcttttattttaatagctgaaggaatcacctagaagctatcagaaatttccttttctaagaccaatattaacaagaattagtagtagaatgttcttatgcttataaatcaggttggtttgaactaagcctcactgaccttatccagagccacctgaaccactgcttcgctttctgtgtccaaggctgacgtggcctcatccagcaggaggatcttggggttgcgaaccagggcacgtgcaatggcgatcctctgcttctgcccaccactcaactgggcccctctctctccaaccagggtgtcaaatttctaccacagaaaacccagaatgatttagcataaggacaagctatctcagctcatattttaaattggtaaggaatcctatacacagcccaagtctcacaagtaatacaggtccagttctttaaatcttatttaacacaataaccaacctcagtttttaaaaatgtatctacgaccagttgatactgctagagctttcaaatctgaagtaatcttactttcccttcttaggatttcccttcttccgatttatagtagtttcctaacttcctgcatagtaggcctgcattttattttttgcacctctagaaaggcaaagggcaaggacaacttacatgaggcagtttcatgataaagtcataggcattggcttccttgacagctttctcaatctcatccatggtgacattttcacggccatagcgaatgttttcagctatcgtggtggcaaacaatacaggttcctgactcaccacaccaatgatttcccgtagaaaccttacatttatggtcctaatatcctgtccatcaacactgacctggaataaaaagtaagtgtgactttcatacatttgtaattgaaagggcaacatcagaaagatgtgcaatgtgactgctgatcaccgcagggtctagctcgcatgggtcatctcaccatcccctctgtggggtcatagagcctctgcatcagctggactgttgtgctcttcccacagccactgtttccaaccagggccaccgtctgcccactctgcaccttcaggttcagacccttcaagatctaccaggacgagtgagaaaaaaacttcaaggcaattcacagacacaggatataggaactgactgttcactaggtttaaatatacatgcacttttttataatctctacaagaaaacatcagaaactcttcattcaatagattaattgttgattaatcatttatcactgtaccttaacttcttttcgagatgggtaactgaagtgaacatttctgaattccaaatttcccttaatattatctggtttgtgcccactcttcgaatagctgtcaatacttggcttctaaacagaatcaaattttaagagattactaggttacaataactacttttagtgatattttgtggagagctggataaagtgacaaagaaattgacttaactggacaatcttttagataggtggatagatggccaactcagacttacattatcaattatcttgaagatttcataagctgctcctcttgcatttgcaaatgcttcaatgcttggagatgcctgtccaacactaaaagccccaattaatacagaaaagaatacctgaggaatgtgaagaaaaaccatcaggctactgagatagtgacagcaattttttttcatacttcttctgtctttttctaacataggtaattaaaatttaaaatggcgaggcaacatataaatactaggtgttaaaaatattttaaaagtttgtaactaacagtacatttaattccttttttcattttttttcctttttaagagacaggttctcattctgtcacccaggatggagtgcagtggtgcaatcatagctcgtcataacctctacctcctgggctcaagcaatcctcctgcctcagtctcccaagtagctaggactacaagcatgcaccatcacacctgactaattttttttattttttctagagacagggtctcgctacgtgtcccagcctggtctcctggcctcaagcaatcctcctgcctcagcctgcaaaagtgctgggatcacaggcatgggccaccacacccagccaagagtaaatttcaaatgtgtcacctcaaaaggtgtcaagtgaggagatagatatgttaattagcttgctctgatcactccacattttgtgtgtatgtgtgtgtatacataaacatcacattgtattccgtaagtgtaatgcaattatgatttgtcaattaaaaatagcataaaatttttttaaaaaaattttaagacaaggtcttgctttgttgcccagcctggactgcagtggtgcaatcttggctcactgcaacttcaacctctgggttcagacaaccctctcacctcagtctccgaagtagctgggactacagacaagtgccaccatatctggctaattaaaaaaaaaaattatagagatgagatctcactatgttgcccatactaaaaatattttggaaatataaatacttttcaatttagaatgcagaattagtcttacttgctcaataaacaatgatttaaatttcacagggctagaatattataataggatatttttatatttcttcaatgtctagttttttttttatttagatcatcagtaaggtaaagtggaaataaatgctagcagaggagtcagaagacccagttctgaatcctaaattagtaataactagttatatgttgttaggccattctcttagaatctttggcttcaatttcttcattggcaaaaacaggcaagattctatctgttctccctacccagcaatcatagagatgttgtatcatgataaaacagtgtatatgaacattttttgttaattataaagcacacacacctaagacactgatcctttatcaggttgtcttttttgccacaaggccgtgttctctttaggccttttgtttttttgttttgtgcaaatcagtttcttattggtaaagacttaactgtgtttctctttggggttgatgagaattaatgtcattattcattttttctaaatcacatggaattatattgctcaataatttacacagaaggaactttgctaagtgattctatattcattatctcagttagtcctcaaaacacgctgaaagttagggttcattcctgtcatatcatttggcagaagaggtagcagaggcttgaaaagtttagctggctgccctaaatcatacagctaataagtgacaaagctgccatttgaatcaagttggtccgatatcaaaccccacactccctattttggatgcctccagtgtgtgaagtatattcatgcccagtgaacactggatttaaactgcttatctcaatcacagttaaacagaaaacatctgttatgacaaccaaggatcacccacagcatcactatactaaaaaaaaaaaacttcatgggaaaagccattccccactgagcaatgttggataaggcaaatttgaaaaaaaaagaaaaagaagtgattattgaatccatattacaaatctggctcctgaaaaagggaattgttttaagggattctacaaaatatcatctctcattgcctcaatctatttctgcttggcctacgaaaaaggaactaagtgactcttctaacagtgtattttattagatccagatatgaattgagtttggtttgcaaattatttcattgtctttaaaataaaagaggataacattaaatggcaagacttctgtgcttgcacaaaggtctataatgcagaaaacttccaaacaatcttttaggaagaggaacaatttatacttccataatttgtgaggtggattagctgccattcgaaataatttgaaaagaagtcaaaatgtgtattttgccatttttgtgaatagtaaatcagaaaataaaagtgaagtgtttagcaacaagtttggcacaaataatctcaacaaataaaagttcatgctattgagattgctaacgttaatattatttaggctacaggataaattgtgcaagatatctgcaaaaacaaacaagcaaataaaagaaaaaactggttgtcggatgcatctaatttttttccactttttttttttttttttttttttgagacagtcttgctgtgtcacccaggctgcggtgcagtggcgcaatctcaggtcactgcaagctccgcctcccgggttaacgccattctcttgcctcagcctcctgagtagctgggactacaggcgcccgccaccacgcccggctaattttttgtattttttgtagagacggggtttcaccatgttagccaggatggtctcgatctcctgacctcgtgatctgcctgcctcggcctcccaaagtgctgggattacaggtgtgagccaccgtgcctggccttccactttttaacctagtagtgcatatgtctgtagtattcaacagttgttcaaaatatattcttctaaagtcaagccaacattactggatttcattggcattttataataatggttcatttctcaatgtaaaccacttacagtgagtacttgtccaatagaatattcccctgagaggaccaaggtggtcccataccagaaggccagagcataagatgcatagatcagcaggaaagcagcacctatagaaatattggctgtaatagctttctttatcccaattcttttagcttcttctaaatttttgttgtacctgagaaaaagaacaaaaatgatcacatatacattttatgaaaacatgtcgatatagcatgatagttacagagtggctaggatgtgttcagtcctgtgatatacatgcattttgtcctgctgctcatacattgaccctatatagtagtactgttttactccctttttgcagaagaagaaactgacatttatagagattaacttatttgtgggggagtcttctaaaatttccttctctggctttagcaatagcaaataagtgaagcaatatttagcaaacttctaaaacttacattgtttcatacacaagacaaagtaaaagccatggaaaaaacctgtgtctttccttcaaaatctgcatgcctctttaattaataaaatggagagataatgttagaaagtactaaaaaaaaaaaaaagggacagtcatttaaatctctgaacattaaggaagtttggagacagtttgctctctgtcctgccttcctctaggactgtcggaatgaccaactgagaggttacatgtgtgagagcattttgagagttctgaattgccatgtaatactttttacatttaaataagctgtacaatttatcttacttccgtagacatttattttaaaaatcactgacctacaaaaattatttggcttacaggtttataaaagcacatcattattcatcagcattccctctcttccttctcctttctacatattgactatgtgtccttccctctattaatgctcccaacacttgtcatgccatagctgccagctgctgaactaacaggatctgacctggtggcttgggccatccacggcttctgactaactcaagggctgagaaaaattaaattattagcatatctatagccctgaacccattcatagcacaaaggcctaccctacattaaccaaacctggtgaggacccattaatacttcttagagcaaatataggaaattgtacaaaaggggcaaaaatgagcaaatgaaaaaaaatcgaaaaacaatgttggagtcactgacagattttatttctgcagttctaatgacttacaggttattcccaactgataattcaaatattttttaaaccctcagagggtggtcaatttttgacggtaaagttaaaggagatgatgtctataactcgaccttcatttgaaaggaacagagaagactactctgtttaagaggatagctatggagataagctaatggagcccagagttaaagaaaaataaggaattttgcaaatgtagaaccaaggtaaaaggattagagaaacaggacagattgccttaaatctgtctgtattttcttaatcgcaactccctgcagaacctagagcattgccttggatagaggaggagctaataattgttgaaattcatgaacttacttccatataaaagtcatactttaaggtctttgatccataaattcacaactatataaatattatatagcattatattaatttcctttggagaacttgttccattagcatgtacagcagagctcaagcactgtccagatatgaacatgcattgtttcttgctttcatgactactttaactaggtacattacagagttacaaaagcatgccaagtgaaatttacatcactaccgtgttcactaaagatgaaatttaaacagaacttcatagtgacaacatagcaacacatcattagtttctaccccccaaaatgtaaatcctcaacttgccagttatcatctgaacagaaaaattatttttgagaaacgtttcaattatttatatacacatatgcacacacacacaacacacagacacatacatatctctcactttatgagttgatctgaggtaaaagctaccactgggcataacttacataagaatatatttaaggacatttaatacatatgtactatactctgttatctcctttatttcagttctcgcttaccaagactaacgtagaaaccagtctgatgttgtcctatgcagccagaggaaacatttgcacagaagcacaaggaagaaaatcatttagacatcagaaaggagaaataaaggaaagaagggggcaaagggaaatgagatataaacaatactccttttccataagctctttgttgtttttccatacaaatgccatacataaaactagatattaaaatcatccattcatcaaaggctttagtacagaaatggtcatgaaagtaggaatgactaaaagagactaaagttatataacaaaaccattggtatgtaggaaatatgactcttcttaaatattgtgaaaatatttatcaataatgcaagtaactactttaagaataaggaacaattttggttaagccaacagaaataaatattaatagataaatatattttcaaggcacataaaagagagaaaaatatttttaagtgaaaaggaacaaaactattctatacgattgaatggaatttattttaacttctggttaaatttccattcaaagagagccagcttccctcctgcactgctaatttgaagagaaagccagattaagacctcaattactttatgtagaagcagagaagggaaggagaagaacaggaaagaaaactgattatgtctggtctaagaatagtcatcaattctactttcaagttatatcccaaatctaggtacctgtcacccctctcctgcctctgctccagatcagggagatgctctggcctggaccattctgccggcctccccactggtctccctgcttccaccctttgacttctcgcatccattcatgagacccattacagacaaacaatctgaaaacataacgtggatagtcattcctctttttaacaccctcaaccactcccctgtgcccttagaatacaatcctaactcttcatcatggcccatcatccccacattctggcccctgcccaccccaatctcccctcattcaactgagcttcagtcatgcaagccttatgacgtttcctagaacatactaaattcttggccaccccaggaaacttggaagactcttcttcaaacccatcccatctctgttcccaccatggcttgctttttctcatccctcaggtctcagctgagatgaaacctcctcaaagaggcctgccccaaccaccgtatttaaagttaacttgaccattcatcatcctcacactctttgattctttcagatcacatttttaaatcaatatttttatttttttctttgacgattccttatatttcttcctccctttctccattccttccatttttatccattttactattttgactgaagatcacaaaataacctctgtttctgattcacagctgaaaacctagagccctagctttgtttagaactttataaaataaaaaagaaaagaaaaggaaaacctagaacctagcacagtgcctggcatgttgtaggtgctgaataaatttgtcaaataaataaactttaaagaaatggccaacttgggaaggacattaggccatcagtttgtagtcttacgtcaattcttgatctccaagcaaaattagtttcagttctctgaaggagactgccctttcaaagatacattcaagtaacttatattttctgaagaaatgattccacatgtaaaatactacttagagcaaatataggaatctctggatatagctgtgtaagtccatttgtttattcttctaattaaaatttgatcatttttgctaggaaaaatattttcatatctaactaattaaagcactccattaaatctgaatccctttaaactttcagtgaactaaaatatcagatttatctaagttacaaatgttgggcttcactcccacaatgtccatttcctccttctcaggttttattccatccatcattatagtttttgttgctaataatgtccttaaaaatattgtcagttcctcaaatttaagatgtctttaattgtagcaagtactggtattctgtcattttataaagcattaagaaatgagtttaatagaacattccatatgcagctaggactcaaagggctatacctcagtatattaagcaacacacagcagaacttgcatgtctcagtcttggcaccaaccaggtgaaggaaggaaaaaaacctccctgagaatctggaccacaaagtaggactcatgcaggtctgagcatgaattcacactaccagtgttgtccaaaaacaactagacacataatttaatgtaaggtggtctcaggttagcagtgcccttggtgaatagcagaagcaaacataaatcctgcctgatagaattggacttcaatccagatccatagcaaatttaagatggcactgactgttaggtttatttccatttcagagatgatggattcattctgaatggatgaaatactatatattttctaattgttcattcctggtttacaggaatgccatttattctgaataatgataggtacccagagatcttattgtattttgttagcttataaaacctactggaatttctgtgtagacaatcttatcgtctgtgaataacgacagttttcttcctattttccaatacttactgtttttctttttcgttttctttttttcattcttactcttatttgttttattggtcttattatctagtactagtacaacagtacatagaaatgatagtaaacacatttgcctcattcattatttgttttttattttttaaattgacagacaaaatagtatgtatttatttcattcattattttaagtgttaaaatatttttaatgtttcaccactaaatgtttcctgcgggtctctaatatattaagaaggttgtttcttattcctagttttacgagtttttgtcatgaatcatatataattcatgcttttccccttacatcacaacaaattttttcttttagtctattaatatggttaattatattaatagatttcctaatgttaaaaccatctttccattcataggataaagccaacatgttcaggatgttttcaatttggtatttttcacatggatttatttagctaattatttatttatttataatttctgcatctatgttttaggtgaaactgtcctttagttttcctttctcatattatatctgcctggtaatatagtatcaaagttacactagccccataaaatgaactcacaactttttttttccattttctacaacaatttatgtaagatagggttatctctttcttgaagttgtggtagaacttgcctacaaaattatccagacttgttttgtgatttctgcttgtgggagagaagcagtggaaaatggagatttttaactttgaattcaattattttaacgattatgggtttactcagatcttctccttcttaagtgagagttttaacctacatttttctagcatattatctatatcatgagggtttttaaatttattggtataaagctgcaatttaaaaatagattttttaatctgttacaagttttccctattcattctttttttgttcctgattaaacatataaaatagttatttataagtctttttaaagaattagtttatggatatgtcaatcttccactcttttgcctttattttctattaaattaatttttgctcttacccttattatttccttctaatattttatttttctttccctaacttcttgatttagatgtttagttctttaattttcaataattttgtatttcttctaccagatactctggtatcactggattaggactcatttttaatgtgaaatcctcagctttggagagagattgtttcctacttcacagagtagtataaattcagaccccatctgcagatagcagtcaggcctgagaatctaacttctatggggagatgttttcctccagctgagaaaccaggaagaagctgttaagttttgtctgtcttccaatgctgttgggctgttgggcatattatttttctggtccaccttttctctgaggaaaactggaaaagaattccaaactcaaaacttcattatgtctctgctcaaatatcaactaatcagaaaatatttttctgaataacttatctaaatagtatcctcatgattctcttattttatttccccaaataatatttaccccaactggtgtattacctatttgattatttgtggttgtctgtaaccttaccacccccattagaatttaagctccatgagagccggggatttatttcattgaatatttgctcagtcattaagcaggactcctcattttattagccagacatcttttaaagcaaaagcaaagactttagcaaaaatcaaaatggaacatagatattgctttcctttgaactatggcacttaaccattataaattattctcagaagacatatatttatatgtgtgaatataccatagaacaaaagtactccaaacacatatgcacagttaaaaaaattatgcaatgaatactcatgtaagtatacctgagatcaagaaacagaacactgccagaaccacagaatcccctgctgtgtgttcggctctccttacacaacttctcatcttccctagagctaaccattattctgatttctgaaaattcccttggttttcttcatggctgtaccaaacaatgtataacccccttaaccaatacagtttactttttcataccttcaaagatatttatattcataagattgaagtgttatagcatcagaatattataatttatattcaattttacataaaatctgttgctgcttagaaatcagtaatctgatttatattctaaatttcaataaattaccatctatgctttcagaaatctaataaaagggaacagttgtaagcataatactaaacaacacataatataaaagattttgaacttttgtacacataagtgctttttggttatatttttatcttccaaatcatgtagcatatgtcagctgaataggggcagaaaggaaaatgaaccacggattaaaatgtccccatagatcttacacaaaatactcagtcaatattagagaatcactaattaacttgatagaggaaaaaaatcagaggtataaaatacatttcagtctttggaaactatttttatgttattgcccatctagaaaactctttgaattagcagataaaagaaaagtacaattagaattgcaacttctccaaaatattagttatgctgtaatacatccattaagctatttaagaaaacatatatatgggagaaaatgcttataaataacactgtcaatctgaagggcatttgagaagacagaatttaacatatctatccatttaaaaaagaaactcaaacctttcaagttctttcttttgtcctccaaatgcaatcacagttctaattgctgccaagacctcttcagctactgctccagcttttgcatacgctaagagttctttatcagtaaatgaagatagtatctgtttaaaaatacaattttggatcatgaaaaaaacacgttaattttatcttttgtaaagtaaaaataaatgtatacataaatgctgcttatacattaatgcatgtgtagagcaaaatctgtcttttacttgcctttggtctgtattaacagccactgaagtaaacctctccctgaaaccagccactgatgcatgaacttgggtcccagagggtcctattatgaaagctggatcaattgcaatgggaaaagggctaacgttattgtacctagaatgctgaagtggtcaactacctaaataaagattacacatgacaggccaggtgtggtggctcacacttgtaatcctaacattttaggatgccaaagatgaataattgcttgagcccaggaattctagaccagcctgggcagcatggcaagaccccgcctctacaaaaaaattaaaaattagctaggtgtggtggcacatgcctattgtctcagctactcaggaggctgaggtgggaggatcgtttgagcctaggaggacgaggctgccgtgagcagtggttgtgccactgcagtccagcctgggcaacagagtgagaccctgttctccccacccctcccccaaaattacacaaaaccaatttattttaaaaattctgattaaatagaattatattctttcaataaaaaattcataggcacttgtggactcatttatgtaagtaacattgatctatcccttcttggcataaaaagctcaaagttgtttgggttttgacagtggatttctccctttcctgtgtgtgaaagtaaaaggagctatgacagctagaggaatgggtggatgaaggcaaatgaacattgattagttatgttctaagtgcagacattgtgctgcacgtacctagcctctttagtacccaaaataatattccattgattcactagacattcctgacttctcaaagcaatcttcctggggctgtcccaccatatttgcagaaccattcacggtaggaggtctgagatagggtggccagcgccatcccttaacaaacatctgtagaataaaagaagctcatacaacatgctttaggaatgtttttctgctccttctgaaacctcatggtgccacaacaattgccacaatggacacaaccaaaaataggaagatcacttcaaagtgatactttaaagaaatactttaaagttaggagtgtttaaaaatgttattttaatttattattaatatatcaaacaccacaatgaattctacaaatctagctcccttttccttctatgaccttccatcattataagcagacaaaagtatggttgaatcttcattaagtgttgtgtttttcaggagatcatgtctgtgaaaagaaaaaaaaaaaaaaaaagaccctctaacctatcctattatcaaggatatgaaaaggccaggtgtgatgactcacacctatagtcccaggactttggggtgacaagtgggagaatcacttgaggccaagagttcacgaccagcctgggcaacacatagaaaccccatctctacaaaaaaattaaaaactagctggacatggtagtacacaacacagtcatgatgcagaacaattcagtcacaaggatcccatcagagaatattatgaatgcttctgtgcacataaactagaaaatctagaataaatggataaattactgaacacatacatcctcccaagactgaaccaggaagaaataaaatccctgaacagaccaataaagagttctgaaattgaggcagtaataatagcttaccaccccctaaaaaagcccaggaccagatgaattcatggctgaattctgccaaatgtaaaaagaagagctgataccattcctactgaaaatgttccaaaaaatttaggtggagggactcctctctgacccattctatgaggccagaataatcctgataccaaaacctggcagagatacaacaacaaaaaaactttgggccagtatccttgatgaacaaatatgatacaaatatcctcagcaaaatcctggcaaactgaattcagcagcacatcaaaaagcttatctaccatgatcaagtaggctttatcctcaggatgcaagtttggctcaacagatgtaaatcaataaatgtgattcatcacataaacaaaagcacttgcttatctcaatagatgcaaaaagtctttcaataaaatgcaacatccactcatgatcaaaactctcaacaaacaaggtattaaaggaacacacctcaaaataataaaagccatctatgacaaacttacagctaacattatactgaatgggcaaaagctggaagcattccccttgaaaactggcacaaaacaaggatggaatcaacctaaatgcccatcaatgatagactggataaaaaaaaaatgtggtacatagacaccatggaatactatgcagccataaaaaaaatgagatcatgtcctttgcagggacatggatggagctggaggccattatgcttagcaaactaactcaggaacagaaaactaaatactgcatgttctcacttataagtgggagctaaatgatgagaacacatggatacatagaggggaacaacacacactggggcctattagagggtggagagtgggaggagggagacagtcattaaaaataactaatgggtactaggcttaatacttgggtaatgaaataatctgtataacaaatgcccatgacacaagtttcctatggaacagacctgcacttacacccctgaacttaaaataaaagttttaaaaagttaaaataaaataaacctgccttactctagccggcagttgttccattgaagtttagcatgatagtattggtctacttttgtgagctgtggttccaggagcggtttaatattcagagtgtttgtagtattattttggtcggcttgatttatgtgaagcttctggggctcccactggcccctgcttctgctgcttgagggagtgaaagtggtttttcaagatcagactgccaggtcgggaagagtgtggtggtttcctgtaccaatgccctctagtggcccagtgtctctgggcgctgggaagacagtcttgggcacaaagtacaaaagaggcttcctgggccaggtcacttgctgtgattgggtccctttctgctatatctatttgcttctgtgtctctaggtttgaaggtagagcctcaggctcacagacacaaagaggcttcccagacacagagtgaactacatttcttttttgatatgattgacatccaaagaatttaagaaatttgtttgaaatgataccaaaagtgtaatgctgagtgaggattaaagcttaggtctctagcagccagcctggggctccttttactaaataaatggcatgtgaagcaatgcataattaatcattaaaagattaactcatggtctgtttttaatcttaaaacagacatcaaaacattttaagtaatttttcaacaaatactgatgtgaagagtttgccacctaacttgcttaacattctagtatacagaaaaatcaattgacaagaagcttttgccaaatattttagttaactgataatccccagaaacattatttgaactctatgttactctgagcaaaaaattaacagagacctgagaacttcagtttctttctctgtaaagtgagataatacctatacttcagaaagataacacaggcatttgcgtgacaataaatgctcaataaatgataattattatttgcagaaacaaaataatatccattatacaggttaaaatttctacagtttcttaatacttactacctgacttattttgtgtgatgcttggttttggttgtccattcattacttttgctacatgaatttatattgccttatctgagttgtgttgaactccacaaaaattacatactgggccaatttctctactgaaaatacactcatatcaaatcagtttaaaattaacaccatgttcaccttgaaatggaaaataagttttaaaagatcactggaaacgtgtgctggggtagagagggccacttctacctctctgccttcatgacaggagagagagctgaaggccaaggatttatatgcatccttagggactagaaagtatctgttttcttaaattattttataaccaaaaatttaactgtgtttgaatgctgacaaaactgtaaaatcaatttaaaacttaaacaaaaatctagaaagccaaaaacattaaagtaaaaaaaaatgttaattgaatgggacatctgtagttcactaaacttgagtctctacttgccgtgtgaatggggcatcatccactagagagcatggttctttggagttcaagttttttttttttgttttgtttttgtttttgtttgtttatttgctcgttttcttacaaaggcagaaggtagatatgagagctacattcttctttctcatcccttccccaaataatcacatggccaagaacagcatggagtcttggcaggggtagtactcagtgaggctggatatgcttatccagctgattttgaacagaaaacgtaaaagtaacaagtacagaatcagagtcatcatgtagtaaaaagacctttccgtagggtgagagcaggaagggagaaggtgcagttcaaaatctggattcacaggcttcacctacctttgcccagacagcagctgacagtccaagaacaggactgatggccaaaatcacaagggttagcttccaaccacgtgtaaatcctactataaacccagtgaaaaatgttgccattgactgaaagaacattccaattttgtcaccaattccttcattaatcttggagacatcactgaaagaacagatagtgttagaaataattgtcagaattgtaaacatcaacttttctcgtgaagcctgttttgagtgtagggtagtttatggctagagtattttgtgcctatgctttgttttatttagcagggtagaagtttctactaggatatttgtcattaacaacaaaaatccatagcccacatggccccaggaaatggacatcgtgtacacaagaagtattcaacctaggaatttcaaattgctcagaaatttcctcagaaagtatcttgttttgctctactgcacatcctcagaggatttcttcattctggcaaagcccagtccttcatttaatgctagtcatgcaggtccccccataccctgtcaaggcactgggaacaaaaggatgcacacgacattattgctgcttagaaggaattttgtctcataagtacctttgaatgatacattaacacctcctaacagatgtgatgacatctatttcattttactaaggataagaacgacacccaagttcaacataaaactaaatacttactctgtaagtcgggtgttaagctccccaacatcgtgcacatcaaaccagcctatctcctgtcgcattatagcatgaaaaaactgttttctaattttgtgtatttgtcttccagctgccaggcaccaaaatgaaacctgaatgtaagcagcaaccagcaccccagcaccaattccactgtaataataggcatacctgaaaaacaacaagaacactgcacatgctctctgtttcctaatcaatgtaccttttccaaagagaccactcattcctattttttcacttatctgggtatctcgccatccttaacaaataagaaggggttgtaacaagcagagttgatagtcaccatccaactatgtttgcaccaatatggtggaatggttaagaatgatttctgctttggctcaaatcccagctcttcacttcactgttatgtaatcttaggcaagctgcttaacttttctaagcctcagttttctaattagtaaaacagagataaaaatactcatgcatgaaatatacttggaccagtgcccagcacatagtaagcactcagagaatgccagttactgtgaaagatggtgtggtatattggggaatcacagcatcaggtaagacccaccactgtaatatttttattacatcagcatcagttgataagtgcattgggttggtctctgtacattggggatgaaaagaagtgacagaacttgtcagaaagtgggatcaagaaatggaaataatcccttggccttttgggctagggattatcccttgggctattaatctagtagagtttagatgccaagagacaaatgaaatttttaaaaagtagttttatttcatttgcccaactggccatcgtgagttatcctaaaatgcttaacgaatcaaatagtggcccttccaatttaaattctagcattaaaaaacacgagtattgtcttaaaaaacagactcttaatcaatctagaaatcctgaattaatgtttccttgctctgagttttcatatttaaaaaagcaaacaggccaggcgtggtggctcacgcctataatcccagcactttgggaggccgaggcagacagatcacaaggtcaggagttggagaccaccctggccaatatgatgaaaccctgtctctacaaaaaatacaaaaaaattagccaagcgtggtggcgtgcgactgtagtcccagctacttggttacttgggaggctgaggcagaagaatcgcttgagcccaggaagcggaggttgccgggagccgagatcgtgccactgcactccagcctgggtgacagagctggactccatctcaaaaaaaaaaaaagaaaagcaaacaattcacacctgtaatcccagcacttcgggaggccaaggtgggcggatcatgaagtcaggagttcgagaccagcctgaccaaagtggtgaaatcccgtctctactaaaaatacgacaataataataataataataacaataataataataataataataataataaaaattagccaggtgtggtggtgcacacctgtaatcccagctactcaggaggctgaggcaggagaatcgcttgaaggcagaagttgcagtgcacagagatcgtgccactacactccaacctgggtgacagagtaaaactccatctcaaaaaaaaaaaatgcaaacaattcttgggcttcactaaacaattaatttttaggttaaaggcaaacattctaaaataaaatacagtattccaatattcccactttttaaacttcactacttaccatcttcaaattaaactgtgtgtttgaatcatgcagaagctataaagatggctaggtaacaagcagacagtctctgacattgctgttcacaattcagcactcagcccatcaggaatcttgggaaacaagttttccccaaactctaccttgtaacttacaatgcatttatcaaggaagatgtaattagaacactaagttttagttaacagataactcaataactaattactatctaagtgttcatgatacaacaagagatagtattctatctaagtgttcattatatagcaagagatagctaatagaaaccccacatcacaaggaaaactcatgctttgagaataagttaatgtattttaaactgtcagtgtatgtttactcaaaagcatgtacatgatgattaaaagacattctgtttcattttccccaatgtaaaaaacaatgcctctccacaggaatatttggaggtatttggtcctcagctttcaaaatatgataaagtgtctccattttcggcagggcatggcggctcacacccgtaatcccagcactttggaaggccaaggtgggtggatcacctgaggtcagaagttcaaggccagcctgagtaacatggtgaaaccccatctctactaaaaatacaaaaattagctgggtgtagtgacacacgcctgtaatcccagccacttgggaagctgagacacaagaatcgcttgaagccaggaatcgaaggtcgcagtgagccgagatcgcaccactgcactccagcctgggggacagagtgacactctgtctcaaaaaaaaaaaaaaaaaatctatttttttcaaatgtacccagatcatttacacagtaatgtaaaatcattttcttctgattcacctacacgtacctttggacatctgttataagctgttctggagaataaacttcaagatatgtaaatcattaaccaaaagcttccccagtgtgagttaagaatagagagactgtattttttctgggatgttttattttattgttcagaatcagatgttgagtttaaaaaaaatttcttttggctgctttcattgtcatgtcgtatgaaaacatccaggaaacaaattaataattataagccattgaaaataattattctgtctctctctttttttgtgggggggtgtgggggacagggtcctgctctttcccccaggctggagtgcagtgatgtgatcatagctcactgcagctttgaactcctgggctcaagcaatcctctcacatcagcctcccaagtagctaggactgtagctatgtgccaccacacctggcacatatatattataaaaaataatgattcttaattcaactgcattttaaaagactaccttaaactcctctaatttccttatatattaatatgatattaaacattgatcaatgcatatatgtccattttaagcttaactctaacttttgtatactttatgcagccaattcttttcttaaaaagtctacatatactcttctaaaaactatcaagagtattgttctccttaaaatttctgtgatgataatgcaaagttttaaacatttctacaacttgatgaatatagaaaaacttaacaatagtaaggagaatgtctaattacctggtcatgtcttcctccagattcatgaagaaccctgtatcattgatatcacctagaccaccacaaaacaaacataccatttatgtctctttagtctccattaaaaataaacatgtaaaaatgaatcaaactcatttcatttaatgatttacataaaaataggtcgaactgactcagttttaattgtgtgtaagcattatggcattcattcaaatacttctctgctgactgtgtgcaaccacatatacaccaactcagtgatgtttatttgcaagaagaaacccacatttggtaagaggtagtctgtcagcagaaatatcagtgtccttgaattaaaatattttttggaatatcactccaagatcccactaaagaaaaatcttttgtcctgataaatgccattgagtacttggtactaaggtatatatttaaaatcttagcatttttccagttttattcttatttaaaaatatcaaatacaaagaacagtgtaataaacaccagtgagctcatcacccaatattagcaaatgctaacatttttggataaaaagtacattataaaagtatttcataactttacccctaacacacagacacacacacacacactcagacacatatacacacacgagcacaattcaacatttttgtgtgtacattttcagattttatgtacgcatgtatatacacacaagcacacacacttattttttaacaatggagtcatagtttacatttagtggccaaattttttcctgtcagtatatatatgtgtgtatctattttttcaatgttgcaactatttcacttgtttccaatattttactgttacaagcaatgctgtgttaaacatacttatacacatatgttataaatgtacaaagagtaaatattttctaggataaattatcacaatcgagactgcaaaaagttatgttaaaatgaaagggcctgtttcagttgagtctgatttcaacaggtatggaaaagaggggaaaaactatttctagcaaagtgaacaatatggacaaaagtcaacagcaagtttgaagaatgggtaagcctgtttttgacaggggtaggaagtgtgttgtgtggatggagggaggtggttatgtagctggaaagataatctgggtcctgcaggtacggtgcaagaaaacagaccagcagttgttcgacagttttgagcaaaataggatataattagaagtatgttctacgagagtttagccaccagcaatgtatacgattaactggaatgtggagagactaagggacttgagctactataactatgtagggaaagagagtctaaatgagaatagaaaagaaagcaaatacttatgagatttatagaggaagaagttacaggacttagcaactgatagaatataagtagagagagtaaaaattttaaaaatgatcaaaacatcaagcctaagcatttggagaatgctagtgtcatggtgggaaataagaagtcagcaaaaagagctaccctggtcagaggagagattattagtttggtcttgaacatttttgttttgcagtgcctggcacattcaattgaagatgtccaataagtattcagactgtaactttccagttttagagacagttcagatctaaagatttaggattcatgtgctagaggccatagctaaatccatctctccttacccataaggacaggccagcagatagggagaaaacagcaggccaagcacagaatcctggagaaaactccattaaagggtaagacagaaggtaaggaagaaacaaagagatgcagaagcttagaaaaacatgcaagagggattcttgactgctttgccttatgtcaatacaacaataaactttttcagattgaatttttatttaaatcagttgtgagatttcttctgctccacgttttcaaaaatgaaacaggacattgaatagtcaggtgaggatttttctccaaatcaatcttgggaaagcttacattatgtatcttctgtatttaccaggaaatgtctctatatagtattaattgttgccagtatgtcactaccaaatgaagaccagttttcaagtctaactaaatatctgttttctactcattgtttctaccagttttctcaattcttaagataagaaaccaagataatttaaataaatgttcttcagcaatgatgtcttctaagtctacagtcatttctaaatagctcaaaaagtaaaaaattttgttcaaggtcaaaattgcctcctttatgtttgtatgtccaattacaccatacctatagcttcagccatcaaaatacatagaaaacaagtctagcaccaagttccttttatttgtgcttcacctttcaaagtgtaccagtcaaaataaaaattgggcattcaacaaagaagtataaataattctattataaagacacatgcatgcatatgttcattgtagcactattcacaaaagcaataaacctaaatgccaatcaatgacagactggataaagaaaatgtggtacatagatgccatggaatactatgcagccataaaaaagaatgagatcatgtcctttgcagggacagggagggggctggaggccattatccttagcaaactaacacaggaagagaaaaccaaataccacgttttcacttataagtaggatctaaatgatgagaacacatggacacacagagggaaacaacacacactggagacttttggagtgtggagggtggggggagggagagaatcaggaaaaataactagtgggtactaggcttaatacctgggtgatgaaataatctctacacaaaaaccccatgacacacatttacctatgtaactatattagtctattcgtatgctgctgataaaaacatacctgagactgggtaatttataaagaaaaagaagtttaatgcactcatagttccacatggctggggaggcctcacaatcatggcagaaggcaaaggaggggcaaaggcatgtcttacatgacgacagtcaagagggcacatgcaggggaactcccattaataaaaccatcatcctttatgcagtggactgtcattgaaggttatcaccagtttgtaggacctcattatcctggttctcctacttctaccactctgatgcttctcccttagtctcagttactgaccccttatgctctccctctttcctacacactgatgtttcccagaactctatgcaggctccaggctgacctcagccacttccacagcttcagtgactccaaaatatatctagagctattcaaatcctctccctcttcacagttaatgctctggttcaagtccccatcatttcttacctctcctgtaacaagactactgtaactaatctttctaccccagttaggtcttcatattgtccccagattttatatttgaaagcaaaagtataatcatagtgcttccattgataaccttcaatgacagtccactgcataaaggataaagatcaagatccatgatacatcatattagttcttttgcaatcttgccacaatatacacatgaaagaaaatatgtttaaagtaccaacaatgatttaccagatatttcctttacccccacacctatctcctcatttcagtagctagagcactgtgcagtcactgtcttcagagagagctgctgctgcattaaaaaaatttatatatgtaataaaagccaagaagaaacctacacgatatatatatataaaatgttcccaaagcctatgcctttgagggttggagaggaaactgagcatgacagaatattttgtttaaatttcatgagattaagctccaccctttagactgaaaaaatattttccacatgctgagaagaaaataagtagttgagaattgctgactacataggcactggagggtccaggtaaaagaagcctgcctccttccacctaagcagaccctagagcaagacctcagaaaaggaaatatgtagtgagttgaagggacggctttagaacagcttccaagaatctccttggacctagagagacacggaaggaacagaatgacatcaaagcttctaagagaggaggacgagagagcttgacggaatgcctatgtagatgatgatgctgaacaacacttggccttctcactcatctgaaactatgttggccctccaagacacaccccagggaaaggtgagagctaccccaaaataactgagattggattttagccacatttactgaagagggactcaaaatagaaattatgttatacaaaataaaagttatgatttttgcacacttggattctggaataatagttacatttgctacatccctttctagcgtcaactcacttcactcccccatccccatcttcaccagctttgctcacttctgtgtagccctggctgtaagcacaccgaagagtttactgttccctaactatcctattttcttccttcaaggctttatccattctgctttctctaactggaatgccctttatcaaaatttttctcctggaatatactcttcctccatgaataaactaaagtattacatcatcttacccctagcagagtgactcatcttgcaatagaactccgtagtaattgacagatgattcaacttactaagtcatacaaaaatagaagtatgactatttacacctatctcttcctcccactcccactggtgtgaggtcatagaaaactgaactatatctagtttatctttatatatccagtgcccaacctgttgtatctgctataacttagcatattcaaaaaatttatgagtggtttcacagagctactacacaagccagaccatttatcaaaatattccatccaaccattctcctactttgtatacaagtgtctcacatattttaagattaaagagagatacattagacctttctacctggcaagaaaagccttttctaaacccaagcaagactttaaaggataagactgtaccatttagggattttttatttgacctaaatacttcagtacatttagtaactttaataactgaacacttaagaacagtatgaataaaaaatatataacatggatacattagtatagtcttatcctttgatgatgcattgataattccctaattggtaaactgaaattatattgaaaaggtggttttcaaactgtcttccacagagacttcatgccaggcatcattccagacactgaagataaacccagaatgagagccactttctctaatatcatcggatttctgttcaagtaagaaatcctttcacttttaggcctcaaacttcaggtgacagggtaacactgctgacctatttagcacagtttttcccaggaacttccgtttttttttcatttagcttttctacccatttaagaagctctaataaaccaataaactactcttcttgtgcagaaagctccatcaaccgcagggaaggggaatttggatcttttgcctaaatgataaatccctatggcattggcccaaactgaaggctgtgactcagtgtagttgggcttactgcaggtgacagagatgattccaggaactacagtctttttatgtgagctgtttatatacctctggcctgaagagctgtgcctcttgcctgaccttcctgacacactaaaaatcaaacttacagggcagcatccaagagatttaaaagaccaagtgctggcatttgcttccaatttaggcagagtgtgaaaaccactagcagagtggaaaagataccagactaaaaagtaggattcctggcccaggaattcagctctgtcaacccgcaagcaattccattatggccacattaattcaacctcctgggcatgtatgtctataaattatgggttcaggctagataacatctaagccccttttcacctacaaaattctattattcagtcttttatttattcatccaatttcttaagcacctagaatgggttaggtactatctgtatattgatcttttatttttttgctgtttttctaatatattgcagagattacattgtaactaattctactttttggcttgaaaacccttaaccaaaaatattattataccatatattattatggtcttagaaaactgtactatattttgtttatctttatatatccagtgcccaacctgttgtatctgctataacttagcctattcaaaaaatttgcaaatggtttcacagagctatacatacacacacacactatatataagtgtgtgtgtaagtatatattatatataaaatataattatatgtaagtatatatagatacttttacacacatatataatagtattaatctcatgtgtatttaagaattaaaagagttactgcatgtaaagctccaagaacaagacccagcaaatagtaaatgttcaatgagggttggcttcagttattgctaacagttgagttcttcctcaaggcttggggctcccattctttctacttttctccatattctatcccagaggatttaacatcacattcaacttaaataaagccaagttgatagtcctggtttttttagttttatttttaaatttatttaattttaattttaatttatttttaatttgggtggtacatagtagatgtatatatttacagggtgtatgagatattttgacataggcatacaatggataataatcacattagggtgaatggggtatctatcacctcaaaaatttatcctttctttgtgttacaaacaatccagttatacccttttagttatttttaaatgtgcaataaattgttgttgactgtagtcaccctgttgtgtgatcaaatactagatgatattcattctagctaactatatatttttgtatcctttaaccatctccacttctacctctgccaccccactacacttcccggcctctggtaaatgtcattctactatctctataagtccaattgttttaattttttagctcccacaaataagtgagaaatgtgaagttcgtctttctgtgcctggcttatttcacttaatataatctcctccagttccatttttgttgttgcaaatgacaggatctcatttttttaaggatgaatagtactccattgtgtgtatgtatcataatttcttcatccatttacttgctgatggacacttaggttgctcccaaatcctggctattgtgaatagtgatgcaagaaacatgggagtgcaggttcgatatactggtttcctttcttttgagtatttccccagcagagggataactggatcatatggtagtttaattttccattttttgaggaacccccatactgttctccatcatggttgtactaatttacattctcaaaaatgtacaagttgtacaacagtgtacaagggttttcttttctccacatcctcgccagcatttgttattgcctatctttggctaaaagccattttaactggggtgaaatgatatcgcattatagttttgacttgcatttctctgatgatcaatgatgttgagcatattttcatatacctgtttgccatttgtatagcttcttttgagaaatgtctattcagatcttttgcccatttgttaattggagatttttcctattgagttgtttgagttcctcatatattctgattattaatctgatgtcagatggatagcttgcaaatactttctcccattttgcaggttgtctcttcactttgctgattgtttcctctgcagtccagaaggtttttaacttgatgtgatccatttgtccatttttgttttggttccctgtgcttgtaggggtattactcaagaaatctttgcccaatctaatgtcctagagagtttttccagtgtcttcttttagtagtttcatagtttcaggtcatagatttaagtctttaatccatattgattttatttttgtatatggtgagagaaagggatttagtttcatttttatgcatatggatatccagttctcccaccaccattttttgaagagacggtcttttccccaatatacattcttagaaactttgtcaaaaatgagttcactgtagatttgtggatttatgtctgcattctctattctgttccattggtctatgtgtctcttttctttgtaccatggtgttttggttactagctctgtagtataatttgaagtcaggtaatgtgatttctccagttttgttctttttgctgaggatagctttggctattctgtttttttcgtggttccatgtaaatgttaggattcttttttctatttctgtgaagaatgtcactggtattttgatagcgattgcactgtctgtagattgctttggtagtatggacattttaaaaatatccattcttccaatcaatgaacatggagtatctttccattttttgtgtcctcttcaattttttacatcaatgttttacagttttcattgtagagatctctcatttattgagtaaaagttattcctaggtatttatttcatgtgtagcaatagtaaatgagactactttctttttttttttttttttgagacggagtctcgctctgtcgcccaggctggagtgcagtggcgggatctcggctcactgcaagctccgcctcccgggttcacgccattctcctgcctcagcctcccaagtagctgggactacaggcgcccgccaccacgcccggctaattttttgtatttttagtagagacagggtttcaccgttttagccgggatggtctcgatctcctgacctcgtgatccacccgcctcggcctcccaaagtgctgggattacaggcgtgagccaccgcgcccggccgagattactttcttgattaccttttcagattgtttgctgtcaccatgtagaaatgctactgattgttgtatgttgattttgtatcttgcaacttaactgaattcatttatcactcctaatagttatttgttggagtctttaggtttttccaaatataagattgtatcatctgccaacagggataatttgacttcttcctttccaattcagatgcctttttttttctttctcttgtctgattgccctcgctaggactttcagtattatgctgaataactagtgaaagtgagcatccttgtcttgttccagatcttgaaggaaaggctttcagtttttcctcatttggtgtgatactagctgtgggtctgtttatgtggcttttattttgtttatgaatgttccttctatacccagtttttatcatgaagggtggtgaattttatcaaaggccttttcatcatcaactgaaattatcatatattttatatccttcattctgttgatatgacatatcacattgattagtttgcatacgatgaacaatccttgcatccctgggataaaccccatttggtcttaaataatattttaatgtgttttttttaatccattcagccactctatgtcttttgattagagaatttagtccatttagattcaatgttattattgataagtaaagacttactcctgccattttgtttgttgttttttgtgatcttctcttccttctttcgttctttcttgtcttccttttagtgaaggtgatcttctctggtggtatgttttaatgtcttgcttttaattttttatgtatctgctgtatgttattttatttgagattaccatcaggtgtgcaaatgatatcatataactcatttttaaactgatggcaacttaatgctgattacatacacaaacaagcaaagggaaaactaatacaaactctacactttaacttcagctccctactttttatatctgtatctgtttatatcttattagactgtgtcttgaacagttattgtagttattattttttataggttcattttttagccttcctactcaagatatgagtaagttatacaccacaattacagtgttgtaatattctgtgtttttctgagtacttattattaccagtgagttttgtaccttcagatgatttcttattgttcattaacatcattttctttctgattaaagaactccctttagcatttcttgtctagacaggtctggtgttgaataaatccctcagcttttgttcatctgagaaagtatttatttctccttcatgtttgaaggatattttcattggatattctattttaggataaaaagtgtttttctttcagcactttaaatatgtcacgctactctcttcagacctgtaaagtttccactgagaagtctgcttccagacatgttggagctcctttgtatgttatttgttccttttctcttgctccttttaggatcctttctttatccttgacttttgggaatttgattgttaaatatcttgaggtagtcttatttgagttaaatatgcttggtgtcccacaacattctcgtacttgaatactgatatctttctttaggcttgggaaattctgtgttattacccttttaaataaactttctactctaatctctctgtctacctcctatttaaggccaataactcttggatttacccttttaaggctattttgtaggtcttgtgggcatgcttcattcttttttcttttgtctcctctgagtgtgtgtatttcaaatagcctgtcttcaagctcactaattcttccttctgcttgatcaattttgctattaagagactgtgattcattcttcagtatgtgctgctggtgggggaggggaagagtggtgcaggcaattcaagactctctttcctaccttcttcagtgcctctttccttaatatgatgttaaaaccaaatagtgtggtcgctcacctggtttttagttcttatgaaggtgctttgttttgtgaatagttgttcaatttggtgttcctgtagggatgggggagggggggatgatttctggaggcttttgtttggctatcttgttccacctcctccttacattttatcattttttaaccttttaagttttattagagacaaactctcactatcttgcccaggctagccttgaacttctgacctcaagtgatcctcccacctcagcctctccaatagctgggactgcaggcacacaccaccacacccagcttctagtcctgttctttatgccaagatttagtgtcatttcttcaactgcctggatgtcattttacaggcaccccacctgccgtcttcaccacaacacatttaaaaccacaatcgcctttatctaggatcatttccagatagtggccagtctcataaggaagatgagaattcacagaatattacagaaattcatcagtgattaagctttgtttacaaaaaaaaaagtgatatgacagaatcagagagttccctaggctccagtcatcagagattttaaggcaaaggctacacatattctataattaaaccagagatagatgggagtggctgtcaggaaatctggtccacagtaaaacagcagaacaaaagctgatgtctgttaattaaggcaaagtattgggaagagaaaacttacaagggttctattgcagcaacagagaaggatctgcttactgaagaaggttttagagctgactaattagatcctatgtttattgtaaaaacccccaggctttcaagagcctccgcaagtccaagtccccttaagcaaggactacttttccaataaggaggctctggtatctagtccacccccatggagagataatgaggttctgcctagggaagggcaaaaagaagaatgatctgactgtatctcgggccccaagaatttagtaggctggttctccctccacaggcatgacagagcatgtttgccctcatctctgggacaagcatcaaaacctttgatgctattccctgctttccaggcagacttgagggtatctggcagtctgaatctgcagacaagcagattagtgatagtgtagtaagcgtcctaaagtgaaaatcacagtaaagatagcatgctgtctttggaaaggcatggaaggatagacaatggtgaggggagtggaaataaggagtggcagtgagggaaggatattaatcttacttatttaatctttattttgaaatggtttcatctgttacacagaataggtacactttgtgtaggagatagatgctgaccatatttggttatcacctcctcttggaagcctcccatgattcctctatatggagtcaggtgtcctttctctctttttccaatgcattttatttatctctgtattatatcactaatcaaattcgactgtatttattggttcacccttgtccatccctcccactacactaagctcctcaagagttgggaatgatgagggcatgtactgtgactggcacacagaatgctctaatacaaattaattgatggattgactgaagataacaacccctcactcaataccctacttcagagattggcaacctttttctataaagggccagatagtaaatatcttaggctctgcagaccatacggtttgtacaactactctactgtgtcattgtggcatagaagcagccataggctgcttacattcataaaatgtaaatgaataggtgtagctacatttcattaaactttatttacaggtactgaaatttaaatttcacataatttccacgggtcacaaaatataatttcttcttttgattttttttcaatgatttcaaaatgtaaaatccattcttagttcacaccctgtacaaaaagaggcagcaggccaaattagcccaggggtcatagttggaggatacctaccttccctgaaaggcatggctggtaaccaaggaaattctacttaaagggatgattattcacatcatataataggtactgagtaactttgggtatgtcccaaactttcaacaactatgaaaattgaggtagtatcacagaattttgtaaagaagaaattatataaggaaccatatcatcattgaaagttatgtaatttcatttgtgaggaacatgaaagcctgttgataataacagtaactaatatttgttgagtacttcttatgactagactttgttctgtgattcttcaatgaatgaatccacttaaatatcacaaccatcctgagaagtaggttctattgttatccaacttaataactaaagtatgaataaattccctaaacctcaaaattaaaaattggtaagggtgtggtttttgagccaggcagtccaactccagagtatgttcgctaaccactaaatataccacctcttaagagaataacaaaagtaaactttcaaatatttctctaagctttctctttcccgttctcaagactagaagagtgagctgaatgagaatgactggcaaggactgcaatgtgaattacaacctcacctagaaactagatatctatgaagatggaaatctaaattaccagctggcaagctgtggtgatgtggcccctgtttaacctaggagattttgataggcatacagacacatgggcctatccagaaaggagctagtcttcacaactagatcatcatctgtttgggagctcatgcatgctattaagtaagtgagtttactgtgtgtcttagtccatttgggatgatataacaaaatacataaactgtatgtattaacatacaaacaataaaaatttatttcccacagttctgaaggctgggaagtcattaaaaagtgagcaagatctggatggacagagatgtacccattaggcctgctgagccaccagagagtgatgaagtatttgattcttccactatgaagcagtaagagagctaacgccatagaatattggccaatatagcaagtataggaactaatgaattcagaaagcattgaggacttcctctggtgaatggtgtaaaagaaaggtaccagttcagaggtggtgcagcatctttctgcaggtctctttggatgccgtgaaaggatgtaataaagcataagaattttacatagctcaaacatacaaaaatttttctggcccagctcattacctgcatccacagaattgaagtagttctaccccagggtaaacaatgtactttttagggtcatgaagtggttctgaggacccactgacaagtatcaaaagatccgtatatacccgagattggtatgaatattcatgtgcatgtttctggggaagcaattcattgcattcatcagaaacttgaaagttcaaaagttgaaaggtccttgtaagctaagtggtatcactacattttcaagtacgttatcaaacaggcattttcaacatttgaccacctgagtgcaaactggattgtaagtttttgagtagctcagtttaaatcaatctaggcttgaccagaggtaacctaggaaactcagagatatcaacccattcctccccaatcgagaaagagagagagagagggagagagaggaaagaatatgtatgttacatccagattatttctgtagtctattcactttcccactttccttgagagctgtgttacatctgttttctctgtctctatcagccaattctcctgcttcctacttcactgagaaaactaaagttatcaggagaaaaattccacagattctcaccttctcatctacccaccactgggtactgacactcaaattcacttttcccacctgttactgttttcctcctcagcactggattccattttttctcaaggatatcactcagcaaatctcttccatctttcattcaaacatcactttctcctttcttttggatcatttccattaacacacaaaacaagctacaagctattatttatcctatcctaaaatacccccccacacacacacacacaattttgccccacttttccattcctgcatctacttccagaaagcccaacatataacaatgtccaaaactaaatttctgggatttattgctcaaatccactctccttctccatctctcatttctgttgatagtaactgcatcctcccagtttctagggctaaaaactttagaatcatccccgacttttcgtcttacacccatgttcaatctgttaggaaatctcacaacagattcctacttatcattcaaggttctaattaagttcctatatttcttcttgaagctttccagaatatttctgacttcacagggctctctctttttctacatatctctgctggcacttcagttgtgtgttgtaatgcttgtaaatattatcttttctaactcactacaaatatgaattataactcagactgtctgcctcctacaggactaaacacactaatgtgtatttagtaaagaatccataaacatcactctaagtgcttgtttttgctgcaagtttccaataaaattggtacacaaacaatacttacttctattagtgatgtttgacatcagatcttctaaatttcctgcatttgcaaagatatctgtcatttctccaaacaccagcatcatgagaggaagtccagccccatggatgatggcagccaaagttcccaccaccatatacaacttgtcaagccaatttgaatagcgaaactaaaaagagagaaaaaagaatagcagaggaaaaattagtacagtttcatggaagatttgcttttccttcaaaatatatccaaaatccaaacatttttcagactactactgataccaccctagtccaagacaccctctacctttgctaaattattgcaatagtctaattagaaatggacatttgattcttccattgagttctggcctaattcttcatattggacttggtctgtcttcttatatgaagtctaatgagaaggatgggacattctgggaaactgtaaaagtatttaatggtatataatatagtatttgttgctctagtttctaagaatagaagccacttatcatctcatgggcaaaaacttgaatgccaaaggcccctctgaggataccatggaggaaacattgtgttgctttaagaaagtggtttgggttaaagacctgccaaacaatggaactggtataaaggtaaaatgatttgaagataattaggcctcaagaatgagcagaaaaaagaaaggaatgagtctgatgcatgcttgtcaaggaacattttttctgagaagacagaatatggcaataatgaatgacccacgttggagatctgcataatctctttaaatgtaggcaggtaacaggaaggaaagaaaagcttctctgaacccaaaaagttacaggaaaaggacacagttaagaggaatgggctcagggcccccttgggaagtgattaatactgcttccctataactcaaggaactagctaaggattgaaagaaaaccaaagggaaaaaaaacagaaatggggtaaagccagctgtgggtgtctatggataaatcccagggcagaaggttaacatgtggatgcaaggtgtagctgtaggcaacaggtttgtaatgcagggaggaaactgggtaaaaaaatcataggcctaggcaggaaatataaaccaaaacaaagattaggcagcaaaaaagacatagccacagacagcaagattttagaacttacatatacttcacaaggggatagaaaccaatcctagagttagcttacatgaatcttacagtagcaactgggggatttggtactggactgccgagtggagaaataaagaatggttattaccagtaatgaatggcagtccataaaacaggagataaaaagtaaagccaaattatgaaataattaatgaaaattaagatatggtgtgtaaaaaagtatctaatagatacttaagtatttgcatttaccctttttctagctcttaaatgtgttatcaaatgagcttaagtttgggttcatggcataactttccatgttatttatgggttgatgatctaaaaacatcatcatatttacagattaaaacattaatgggacaacacgttttggcatattttttcatatttcattgaaacactggctaaattttgcactatgtactttgtcttagataagaattcatctgcttccttaaacaaaaatgaaagggaagaggtcttcttttagagattatattaaagtagataaaatatcaaactccttagtacaggaagagaagatagttgatatgaaaaaatttctcccatcaccaccaacacaggacattttacctccagaactgtcactggccataataaaaataagtggatcatgaaagtagacatttactgaatgcctattcaatgacagataaaatccagagataaatgccaaagatataaccctgccttcagagaggttaaagaaaaatgtatatgcaatacatgctctgcatgctttgacagtacagtgtatagaatagacacaaaactgagtcaatcatcattccctcctttgtgaaaaggcttcatatgataaaagaggtgatgcttccttccagctttgaaagtttaccaagtgtagctgggtgcagtggctcacacctgtaatcccagcactttgggaggccaaggcgggcagatcacgaggtcaggagatcaataccatcctggctaacacagtgaaaccccgtctctattaaaatacaaaaaaagaaattagccggatgtggtggcaggcgcctgtaatcccagctactcaggaggctgaggcaggagaatggtgtgaacctgggaggcggagcttgcagtgagccgagatcgcaccactgcactccagcctgggcgacagagtgagactctgtctcaaaaaaaaaaaaaaaaaaaggcacttaagccaaaaagaaaagtaaactgagacagaaaagagcacaatgtgctaaaaaagactggggaccctcaagtttggggtgtaaagtgtggaaacagaaatagctgactgatcaaaagacacccctcactgagctgggaaaattggaattacatctcttaatcttagactagaaggaaggagattaaagtgagtactaattttccaggaataaagacagaaaattgaaagagttcagaacctcatatttccttttgttttttttttattattttttatttgtttattttaacttttaagttcatgggtacaaatgcaggtttgttacatacgtaaacttgtttcatggggggttgttgtacagattatttcatcacccagctattaagcctagtactcgttagttatttttcctgatcctctccctcctcccacactccaccctccgaaaggccccaatgtgtgttgttcccctctaggtgtccatgtgttctcatcatttagctcccacttttaagtgagaacatgtggtgtttggttttctgttcctgtattagtttgctaaggataatggcctccagctccagccatgccctgcaaaggacgtgatctcgtttctttttatggctgcatggtgttcaatgctctatgtgtaccacattttctttatccagtctacaattgatggccatttaggttgattccatgtctttgctattgtgaatagtgctgcaatgaacatacaatgcatgtgtctttataatacaatgatttatattcctttgggtatacacccagtaataggtcaaatggtatttctgtctttaggtctttgaggaatcaccacactgtcttccacaatggctgaacagtgtataaatgttcctttttctccacaatcttgccagcatctgttatttttttactttgtaataatagccattctgactggtgttaaatggtttctcacagtggttttgatttgcatttctctaatgatcagtgatgttgagctttttttatataattgttggccacatgtcttttaagaagtctctattcatgtcctttgcccatctttttattgggttgtttgttttttctttgtaaatttgtttaggttccttatagatgctagaacctcatatttcttaatgacatgaagcaagattgatttctagagagaagggggtgagaagatttgaagaaagtggtaacataatgctgagtaggacaaaagcctcagtcaaatgccctcactctgtagtttattaggaaggagactttaggggaaaaaaatcttaataaccttgagtctcagtttctgaatttacaaaatgaggaaaatattcatacacacagaaaaccttacatagctgttatgagggtaaaaatgagaatacaagaaacttattgagcatacaatatgcaaatatatgatataagcagataatgttactggttttgaaaatataataattaacaagacttttcactctcataaagtcaaaaagcaggcagaccaaaaaacgttgtaacacaggtgaaatgtaaaatagaagtataaactaattgtaataggagcttttaaaaaaggaaatgcgctgggcatgatggctcacacctgtaatcccaacactttgggaggctgagggcaggaggatcacttgagcccaggagtttggtacagcctgggcaacataggagaccctctctctacaaaaaaatttaaaaattgtttgggtgtgatggcatgtgcctggggtcctagctactccagaggctggggtggtaggatcacttaagcctgggtggttgaacctgcagtgagctgtgatcatgccactgtactccagcctgggtgacagagttaagacctaaaaaaagaaagagagagagagagaggagagagagagagagagagagagagagagagggagagagggagggagagagagagagagagagagaaagaaagaaagtttgattagatgctgaaaggaaagagagagaaggtgaaccagaaccacataaaaggcatgttgatccgtgcctaatgccaaagactgggcttcccagggcaaagaagtagaaggtactgacaggagagaggtttaggtaacattcaccagattagatggcaaacatgacttggatttgagagagaattaattcattcatttattcatttaacattcaagggatatgtgaatattttaaaatatctttcaaatatttgaaagaacctaataaggtcaggcttgcttctaggtactggtacacaacagtgagtaagaaaagcctacctatcctcacaaagcatacactctagtgcatacactaaaagggggaatagatgtattcaacattcattcaatatttaagttgctatgaaagttccaggcaccattctagggcatttgggttatagtagagaacaaaatatacaaaaaatctcctgcctccacggagcctaccttcagagagaagacaaacacataaaaaagaaatcagacagtgataaatattcaggagaaaagccatacatggtatgacacagagacaggcagggtcacctggtttagattggctggtcagagaatgtctttctcaggaggtaacatccatgatgagacttcagtgacaggaaggatacagttcatcctgtgatgatctggggacagtgcattccaggcaggaagagccaatgcaaaggtacttaggtaaaaaccagcttgctgtatcccaaggaccaaagagaatgaacactgtggcaagagcagagtgagagggaatatttgtctgcagtaaagtcagaaataacagaggtcagatatgtagggcattttgtgatgacaggaaggagtctgggttttacactgaacttcctgtgtaagcagaaaggaaagcatttaatggttttaaggtagggaccaaggtgatatgatgtggctgctatgggtaaatttttagaagagcaaaaaggaaggagggatactaggagatgaaagagcagttgagagagtaaagtcttgaccaggtgtggtagacagaataattctccccccacagcctgtccaaatcctaatcccaggaacctgtgaatatatttctttacacgataaaagggactttgcagatttaaaagatctccagataggggattaccctggattatctaggagagcaaatgtaattacaagggtgcttataagagggaggagggggcctggagtcagtaggagatgtgatgattgaagtaagaggttggagtgatgcaaggaagggcctgtgagtctagaaatgcaagtgtcctctagaagctgaaaaagggaaggaaacagagcttccagaagaaatgcaatcctgctgataccttgactttagcccagtaaaacttcgattccagaacagtaaggtaataaacttgtgttgttttaagccactaagtgagtgctattttcctacagcagcaataggaaatgaatacacaatgtcaaaagagggatgataaagaggcagggcagagctggaaggaatcacaggttgtggtcaaagactgatacacgtgtgtgtgtgtttataccttcatagaggaaagctcacccagacaataagcccaagatcctgtccacacgtgcaatttactaaggtactcatgtaatttatggggcgtcgttgttggaactgaagcagtcagagaatgttgagacttatttgtaaggtcaccaaaatactcagaagaataacaggaacataaggtgaatgaagtagaagcaatcaaatgccaaagtcctcaaggaatgggggtgggggtatacttcgaggataccaccgaaaatagatagaagatagtataattatgcagaatgaaactcaaatgacaaaggagtttgcatgagaataaaaaaaatttgaaaatggctttgtggaactataggaatgtccacatcatctctgactcctgtgataaggggttgaggaacttaactttacaggcgggggcagcacaagaaaaagccaaagagctggaggaaaatcagcaaaccgtgacataacagaagcaaatacaaaaaatataggagaaagtctaagtgctgctgagagatcaagatagaattttaaaatgtccactgaatgtagagagagacaggaacaggagccaaacttcaataggttgagaactaagtcaatggcgaaatcaagacagaacgcaaaggccacttttgtgtgtgaagggagctggcaggggtggctccatgaagggcatcagtgccttgatgtgtcaatgccaatgggacagatccagttgagagggaaagatggaagatacagaagagaatgagtggtaataatgatgtaaggtccctgagaaggcagaggagataggagccaaagtatgaatgattagtcttaagactaaaactctgtcataactggaaagaaggaggaggaaacagattcagacacaggtaggtttttatgattattgcagctgtgaagctcaaggagtgattatccatataaccataaaagtcacccaagttggttggagcaccaaagtggaaagggaggatactgagccaggtggcgtagtctttgatgatgagatggtcataagatcaaaagatagcagcaataaagaactcttcaattccagagagataacagtttaaccagtcataaatgattacagttgttaaaagcaactgggcatatctgagtctaccctgcttagtagctatgtgaccctgtgattttgaatgcattacttaacttctctaagtcaagttcttcatctggaacacaagaataacacaagttcctaaattgcaggtacttatgtccctatatgaagattatgtcacacaataaacatagggtatttaacaaatgcctggtacaagggaaacacttaacattgttaggtattatctatttagaaaaaaattaatgtttccctaagacacacataatagaaagctcagagttcaatctacagtgcacaattcttgcaagaatatataatctttttttttttttttttgagacagtgtctcactctgtcacccaggctagagtgcagtagcacaatcttggctcactgcatctccacctcctgggttcaagtgatcctcccacctcagcctcccgagtagctgagactacaggcatgtgccaccatgcccagctaatttttgtacttttcacatagacagggttttgtcatgttgcccaggctggtcttgaacttcagggctctagtgatctgcccaccttagccttccaaagttctgggattacaggcgtgagccacagcacctgaccaagagtgtataatctctaagaagttcattttgtgtagaaattacagcccagctctatgtgtcacatttcctcacttgctttagattttattctacttttgtgtttctgtaaatgttgaaacaaggtctgatataaatttaaaaggctagtatagaattttgaatctattccttacttctttcatcacttttttaagattgctaaaaaatctcatagtggaaataaattaacagacattgtgtgcagacaagagctaacacagcagctctgaggctgccatgtttagaaaggcctgtatacaaaggttggcccttggctggaacttggatttggggaggattaccaccattcaaactgataagtatggccaaactatctgtaccaacaatatgattcttcaatctgcagttctgccttccttctatgagtctgaaattttggtgcatgctgggtaggtgcctacaggatcagttcctaataaaatccttgggcactgagtctctaatgagcttctctgataaacagcattctacaagtgctgtcttaactcattgcttggggaaattcagtgtgccctgtgactccattaggagagaactctaggagcttgcacctggtttcttctggacttctccccactcgccttttgccatggctgattttgccttgtatccttttgttgtaataaacattagccataaatcctctgggtcctcctagtctgaatcactgaagctgggcttcttggaaaccctgaacacacaatgttttttgtcttcactgaaaactattattaataagcaatgccagtgacatcaccaatatattgttaaacttttattatgttcttgtgtttataagttttatattgaagttacattcaatgttttctatgttgacttttcaggaaaaagatgtgaggaaaatctatctaagtagtagagtacttcatcaagagacttagaatatattctctctatcctggccccattgtacatcctcagacaagtgaacatgtctggctccagtttcttcatgtgtaaaactggaataataatagtatctttctcaaaaggagttgtaaggattaaatgagattaaatatgaaatacttaggacaatgcttggcacacagtgctttatgtgtgctattactactacctcatattaaagctccatatttttattcttttgtgccttaaaatgaattattgataacattgcctctatatagtaggtctgttaaattttctaaaatataagactcctaaggtttaaaaaaatttaactacaaataataaaaactgaaagtctcaaagtgacagcactgaaatcctggggataaatacaactttaacctaaacgcttctttccatacaagaaagtaacaatgaaaactgtcacttggttactcaagtagcctaagaatgactcaagtacatagtctcatctcaccaaaattccaaagggcgtagagatagaataaaagcaggagtcatggcaagagcaatggtagcacagagaaacgaagatcacataagggaaccatagagtcctcagtgtaaaagtcacatgactgttttttccctacctacaactatttttatagtcaatttattaaaatccattttgcaagacaatctatccactcccttaccttaaaaaaattgctgtgttatgactgaattataaagcatgtgctgttggacttaattggtttagtagtcttccaggttctaatctctggaatctttcacctaacagttcacctaaatttgtactcttagaaaaaaggaagtaagaatccaggtaaataagaggtcattaactaggcagaggttgcagtgagccaagatcacagcactgaggtcatcaaccaaccacacatatatgatacatgtctgattccaagtgtgattaaagaaaagctt

SEQ ID NO: 682 - DNA, 186591 bp, Homo sapiens
  misc_feature (1)..(186591): n=a, c, g or t
actgtcacaagaacagcatggaggtaaccacccccatgattcagttacctcccactgggtttcttccatgacatgtgaggattatgggaactgcagttcaaaatgagatttgggtggggacacagccaagccatatcactgtctctaccaaaaaaaaaaaaaaagccaggtgtggtggctcatgcctgtatcccagctactcatgaggctgagatgggaggattgcttaagtccaggaggttgagactgcagtcagctatgaccacaccactgcactccagtctgggcaacagagtgagacgctgtcaaaaaaaaaaaaaaaaaaaaaggaaatccattcttagcctgtgtgctgtacaaaagcaggcagcaggctgaatttggcccacaggctgtggttcgccaacttatgacctatacaaatggcaattcatatggttcatcctagcgataactgtacatggtgtattagatactatatagcatgttcatatcaaatgtcatataatgtataaggtaacatatacagtataaaatagtgcctgagaaatatttgatgaaaaaatctgataagtacttagcaggcacagtacaaagtaccatgaagttgttaaatgggggatcagggtgtttgagaaaggggtggggagataggtgggcctccctcaagaaggaatgtttcaactgtgagctgaaggatgcccctgcattgcatgtcagggcagtgatggggagaaagactccaggtagagggaacccactctgcaaaggccctgagtcatgaaggggtccctggaacagtgagttggggctgaacccacaagctgcagttgtggggattgtgatccatcctgagagctctgagaacctggaatagttttcagcgcagtgtgaagggactggggctgtgttttgaagatatcccctgtctgcggttgggaggggagtcaggaaacctatttggaggctggggttttcacccaggtcatgcagataagatttattaggtgtggaatgaactgagcaaatcacatgtcttctaatggtacaccacactttttttttttttttttggttttgagacagtcttgctctgtctcccaggctggagagcaatggcatgatcacggctcactgtagccttgacttcccaggttcaagcaatcctcctacctcagcttccggagtagctgggactacaggtgcccactaccatgcctggctaattttggtatttttattggagacggggtttcatcatgttggccaggctcctctctaacttctgacctcaagtgattcgcctgcctcagcctcccaaagtactgggattacaggtacaagccaccgcgcctggcctttagtgatattttaaagactaaattcccttagagatgcctgggtctgcatttattgctactgttctgtttctcactgtgtgtcttgaggtcatcaaaagtaacctgggccttttcccttgttttctgcctcctctaggcttatgagccattaagcaaagccggattggtgtgtgggtcaggctcttcatgttttctttagcttaataagcagtttctaagggaactcattgtgtcattgtttagaatagcaaaagatgagcagcctcccaagtggcaatcagtaggggctgggtgaatacagtgggttccaccccttccgtggtagggtgggatgcttgcagaaggacataagacgaggaagccctttgtgcacagatgtgcggcagcctccaaggtccagtttttaagtgaaaacgtggagatccacttggtatatttggtatgttacctctgtgtaaaaaagcagacaagtaagaattacgtagttgtatttgctgtatttgtaagaaattccagagggataaatgagaaactaaaagaggcaattgcatttgggcagagtaactttttattgtttaccttgatatatactttttttttttttgagatagagtctcgccctgtcaacaggctggagtgcagtggcgtgatcgtggctcactgcatcctccgcttcccagtttcaagcgattctcctgcctcagccttctgagtagctgagattacaggtgtgtgcgccaccaagctcagctaatttttggtatctttagtagagattgggtttcaccacgttggctgggctggtctcgaacccctgacctcgtgatctgcccaccttggcctcccaaagtgctgagattacaggcttgagccaccgcgcccggcctatatatgtattatataaacatatgcacacgcatgcatacgtacacacatatatattttttaaaaattgagtcatggccaggtgcagtgtgggtcacacctgtaatcccagcactttggcaggtgaaggtgggaggattgcctgagctcaggagtttgagaccagcctgggcaacatggagaaaccccttctctacaaaaatcacaaaaattggctgggcgtggtggcatacacctgtggtcccagctgcctggaaggctgaggtgggaggattgcttgagcctggtaggtagaggccgcagtgagccatgatcacgccactgcactccagcctgggtgagagagtgagactctgtcttaaagcaaaaacagagtcatatatttcctattaaggtgaaatttaaaaaataaattcctatattccatcatccccagcttctgccattctaaagcattttcctaagcagctccactgtggatgtagcgggtatttcagaaaggcattagaaatgccctgggagggcagaacccggggcttcactggaggtgctgttgggctcagtctgatgtcaaggcagggacatggcaagggtattgagatgtgaacaagcattactcagcaaggtgacatgtgttcatgccttgatacacttgtttccccaccagctctatttttgttgcctgctctattggtttctttttcttttttttttcttttgagactgagttttgcttttgttgcccaggctggagtgcaatggcaccatctcggctcactgcatcttccgcctcctgggttcaagtgattctcctgccccagcctcctgagtagctgggactacaggtgtgcaccaccatgcccagctaatttttatatttttagtagagacggggtttcttcatgttggtcgggctggtctcgaactcctgacctcaggtgatcctcctgctttgggctcccaaagtgctggggattacaggtgtgagccactgtgcccagtctctattggtttcttattgctggtattgccatcaacttggtgactgagaacaacacacatcactctagttctcgggagtcagaggtccaaaatgtacggctggtgttctttccggaagcttgcagggagaatccatggcctggccctgtccagcatcaagaggccacctgtcttcctcaattcgtggtttcatgtccctccacccctgcttgtgttgtcaaatctcctttactttttttttatttttgagacggaatctcagctcactgtagtctctgcctcccaggttcaagtgattctcctgcctcagcttcctgagtagctgggattacaggtgcatgtcaccatgcctggctaatttttgtatttttagtagagacggggtttcaccatgttggacaggctggtcttgaactcctgaccccgggtgatctacctgcctcagcctcccaaagtggtgggattataggcatgagccaccacgccctgcctcaaatctccttttctgactcagatattcccaccgtcctcttgtcccttataattccctgtgattacattgggcccacctggatcatctaggacaggggtccccaactcctgggccatgaaccagtagcgagcagtctgtggcctgttaggaactgagtcatgcaacaggagctgagtggcgggcaagccagcattaccacctgaattccacctcctgtcagatcagtggctgcattggattctcacaggagcgtgaaccctaacgtgaaccgtgcatgcgagggacctaggctgtgtgctccttatgagaaatctaatgcctgcatgatcatgagggggaacatgtttctagtcctgaaagccaccccctcgccatccctggcaaaactgtcttccatgaaatccatccctggtgccaaaaagcgtggggacctctgatctgggacattctccccattccaaagtccttaatgatacctgcagagtcccttttgccatgaaaggtaagagactcaggttctggggacggggatgtaggcatctttacgggctattctgtgtactgcacctgttcagcttagttccaggcacatagtaggggctcagtacatctttgttgaatgacacaatcaatcatttggttaggctagagaatgtggaaggaggccgggtgcagtggctcacgcctgtaatcctaaggctgaggcaggtggatcacttgagctcaggagtttgagaccagcctggacaatgtggcgaaaccccatctctcctaaaaatagaaaaattacctgggtgtgatagtgtgtgtctgtagtcccagctactcaggaggctgaggcgggaggatcacttgagcccagaaggtggaggtttcagtgagctgagatcatggcactgcagtccagtctgggcaacaaaacgagaccctgtgtcagaaaaagagagaatgtggagggatattatagcaagaagtggatctggaagttttactagtagtggtatttattgagcacctactgtgtgctctggctcatgtttaacaaagtgcttatttgcataatgttagtattcccattttacagatgcggaaactgaggtttagttgctggcctagtattacagggtgaggagctgaagccccatctgcctgacgaggggtgtgttggggatgtggactagaagcttggtcagggagggattctgttcaaacagggctgcttagctttggcactgttgacatttggggccagatatttcccgtcgtgggggctgtcctatgtattgtggccattaagcagtatccctggcctctgtccacagagtgccaatagcactaccctcttcctaagttgtgaaaacccaggatgtttccaaatgttgtcacatgtcccctgagtgacaaacttgcccccacttgagaaccatggtgttgaaacatagatcacggcacatcaactccatgctcctcaggtcaccctgcgtgaaagtcagaatccctgcggtggcctgtgcgtcccgcactgactgtctcctccctgccttcttccttcctcgctgtcttcactgcttgttattcttcagacctgttggcctctctgcggtttctcagaaatgccaggcctggtctgacttcaggacctttgcactggctgttttctctgcttggtgtgcccttcctccagatggccatttggtttactcctctgtttccttccatcctgtatttgtttatttatttttaattgagatggagtctcgctctgtcacccaggctggagtgcagtggtgtgatcgcagatcactgcaacctccaccacccaggttcaagggattctcgtgcctcagcctcctgagtagctgggattacaggcatgcactaccacgctatgttggccaggctggtcttgaactcctggcctcaagtgacccacttgtcttggcctcccaaagtgctgggattataggtgtgagccactgtgcctggctcaatcctgtatttaaatacccgtcctcagcaaggcttgccctcttctctgagtgcttttcatcacacatgtcttcatatcctctcctttctaaaccatctgtctcttctctttaggctgtcagctccaggagggccggcccttggtccctattgttcactgctgggccctcagccctaggaaccgtgctctgtaaatggatgaatgctgtctgtcctgttactgcagtgtccccagacatatccctatgcccagcacatgcctgacccctcacaagaccctggaacatgactaagggatttatttggtgaaacatgagagtctgataagaggagaggaagtggctggggagcaaccttgcaaagatagccagggttggatggagaaaacgagggtgagtgtcagcttcataggacgggccttccacgagaggcctcatggtgcttgggagagttggggtgaaagcaggttggaacaagatgcttgctgctgacatttgggcactgatgggcagcctgacctctgctttctttttagtgcttaacaacactgaagccctgttaagacaggattcttaggactgggcacagtggctcatccagcactttgggagccctgggtgggaggatcatttgagccccaggagtttgaggccagacagggcaacatagcaaggccccatctctggaaagaaatacaaaaattaaccaggcttggtggtgtgcacctctagtcccagctacttgagaggctgaggtgggaggatcacttgagcctgggagttcaaagctgtaatgagctataatcatgacattacactccagccgaggagacagagcaagactctgtctcaaaaaaaaaaaaaaaaaaaaaaaattagttttgcatgtaactgtgttcagttctgtgtcttggacgtgaggatttgtggtacccgcctggatagagcaaggatggccgtgcccctgccttcctgggtgatggggataagtctggaaattgcccctgtgatgttactgggctttattcttagctctgctgagttagggggcagggtggggtgcagcccagccaacagcatgccagggcgcgtcactgcccacgcgatgctggcttcagccgccttcctctcacctcatggccctgccagccgtgcttgcctcctgctgtgtcggggctgggagactttagcctttctccagatgttttcaggagtgcggtggggaaatgaaggccacatgctgtctctctaaacaggattaatgttcagaagcccagcgggtgccctgacctaaccacgggcctcttgcactccttttctcagcttcccttggcttctgagctacccctctgcagcgttgtttctgagtgtggcatttaggagcaccctgtcgtcttgcctttcgtccctccaagccccgtctgttccttggttggttgtgcagaagagttgctagggtttgaatccaggacggtcctgcccctgtgactcgcgggccatcttctcacctgtttgtctctgtgttcctctctgtaaaagtgggaatcattacagtaccttcctcatagactgctagggtgataaaatggagcgatgtacatgaaacctgaacgcagtgcctggtatgcagtccgtgcttagacagggctctggttttatttttatttctttttctttgagacttggtctcactctgtcacccaggctggagttcattagcataatcacgtctcactgcagcttcccactcctgggctcaagcgatcttaccacctcagcctcccaagtaggtgggattacaggtgtgagccactgtgcctggcaccattcagcaatttttttttgttttgtttttgagacagagcctggctctgtcacccaggctggagtacagtggtgcgatctcagctcactgcagtctctgtctttcaggttcaagtgattctcctgcctcagcctcccaagcagctgggattacaggcgtctgccaccacacccagctaatttttagtagagacagggtttcaccatagtggccaggctggtcttgaactcctgacttcaagtgatccaccctcctcggcctcccaaagtgctgggattacaggcatgagccatcacacccggccatcagcaaatttttaagtatacaatatagtattgtgagctatagacactattctgtacagtagaccgtaggactgactgactcatcttgtatgaccaaaactttatacgctttgaccaacacctccctgtttcccccaccaccagctccttgcaactaccattctgttctctgcttctatgagtttgtcttttttagatgtcacatgtgagtgagatcttgcagtgttcgtcttcctgtgcctggcttatttcatttagcataatgttctccaggcgcatccatgttgttgcaaatggcaggatttctttccttttttttttagacagagtcttgctctgtctcccaggctggagtgcagtggcacgatctcggctcactgcaagctccgcctcctgggttcacgccatcctcctgcctcagcctcccgagtagctggaaccacaggtgcctgccgccacgcccggctaattttttttttttttttttttgcatttttagtagagatggggtttcaccgtgttagccaggttggtctcgacctcctgaccttgtgatccgcctgccttgacctcccaaagcggtgggattacaggtgtgagcgactgcgcccggccaggatttctttcctttttaaggctgagcgatagtccatggcatgtatagatcatgttttctttgtccacttgaccacggatagacatttagttgtctccatcttggttgctgtgagtgacgctccagtgaacacgggagtgcagatatctcttcagggcccatgtgtggctgagattaggagatcactgctgtcgtctctagttcagcagtgctagtgcctcctggcgtttagcgtccagctcaagggagtggaatttgggtgtctcagggtctagggccacctgtgcctctaaatcgcagggaagctttgtgtgtgtgtgtggtggggtgcggggggctatgggtatgtggtggggtgaatcttatttctcttctttcccttttcttaattttccgttggcaaaacagagcgccactccagacccctttcattcttgcaatatacatgaaaagtacagggcttgttctgcaaaagaagagtagccccagcgagctcagggttgagtgaagttccgcaaggatggcacctctcggctcttctgggggcttcaggacagagctcagtgtcgccaagcaggacccccactgcgggcggagctgcagggccatcaacattcattaggtggatcagtgaatgtagactctgcggtgtcacaaagcagcacctgtactcactgtgcctgtctcgggatggaatctaagtcagacatccttgcatccccacttatgggctgttccttcaccttgctggtcctcacctttctcctagagttacggggaggagtaaatgtgctaaggcacatacacgccgactctgcagtggccttgaaccatgcttctctgtcacccctttcgttgccttgacaatggctgcagcctcctttcccatctcccctaggatcttctcctagggtctcttaatacaggggtccccaatccccagagcacggactggcaccagttcatgcatgccctgttaggaaccaggccacaggccacacagcaggaggtgagtggcaggcgagcgtgtgagacttcatctgtatttacagccgctccccatcttttgcatcaccgcctgagctctgcctcctgtcagatcacctgtggcattagattctcataggagcgcgaaccctgctgtgaaccgtgtgcgcgagggatccaggctgtgtgcttcttttgagaatgcaatgcctgatgatctatcactgtctcccatcacagctgagatgggaccatctagttgcaggaaaacaaactcagggctcccaccgattctacataatggtgagttgtataattatttcattatatatgacaatgtaatcatagaaataaagtgcacaataaatgtaatgcactcgaatcatcccctaccctgtctgtgaaaaatcgtcttccacaaaacctatccttgctgccaaaaaggggatggctgtctttttttcttttgagatggattcttgctctgttgcccaggctggagtgcagtggcacaatctcggctcactgcagcctctgcctcccaggttccagcgattctcctgcctcagcctcctgggtagctgggattataggcacaatggcaccgtgcctggctaatttttgtatttttagtagagacggggttttaccatgttggccaggctgctctcaaactcctaaccttgggtgatcctcccgcctcggcctcccaaagtgctgggattacaggcgtgagccactgtgcctggccagggaccactgtcttaatatgtgaattaggcgatgccatgaccctgcttaatgcactcccagggcctcctgtgagaattagaacaaaaaatccatgctctgtaccatgcctccaagattggctatgtggtggcctttggtgacttctcccgcccaatcttgggtcctagctcattggtgcagccatatcctccccccaccccaccccactgtggcctttgcctgtgccatctttctgcctggtatgtgcttcccgagatctttgcacagccagctcttcctgacccttccagtctgctaggatgtcatctgcccagaccgccactctggtgcttcctgtcctgacacccctgctctttccttcacagcaggtactgctctttgtcattatgttcttatctgtgagctttcatctttgatggactatgagtcttaagaggacagagatatcgtttctgattttcccccatgcctgtgactagcccaggtctaggcatatagtaggtgctcaataaacagtcatcgaatgatagattgaatgaatgaatgcatgacaggaaccctgcacttatctgtgttaatccgtctcttggctgccgggaacaccagctcctgcaacctggcacttgggtcacctgattgaaccctcctgataactctctaaactctgtaataggtgggttctagaattagtcccatttcacagatgaagaaatcaaggcctggtgaggtgaactgacttgctttagggcagcagggatgatttttgcctctctggagatatttggcaatgtctagagacagttttgattgtcataacttgaggaggtggggagtgctactatcatctagtggcagaggccagcgacgccactcagtatcttacaatgcacaggatggcccccgacaaccaagaattatttgggctcaaataccagcggttctgaggttgaagaagccctgcttgagggcacacatctgtaagtggtggagacgggaacctagacctggaaccttgttttgttaaccactaccctgcactgctcacatgcgggggtgggtgggtgggaagagttgtagaatgtttccatgtctgagtcaaaatcttgcttctctgctctagggagatgaatttggaatctgtgaggcctgaggccattcacttgatctccggccctggagatcttgcctccaagcgacctcaggctccatctgtctgccatgtaccttgcaaacaccttagaattctggctgggcatggtggctcacacctctaatcccggcactctgggaggccgaggcgggcagactgagttcaagaccagcctgggcaacatggtaaaaccctgaatctacaaaagatacaaaaattagccaggcatggtgatgcgtgccaggtagtcccagctacttgggaggctgaggcaggaggattgctggagcccaggagatcgaggctgcagtgagctgtgatggtgccagtgtactcaagcctgggcaacagagtgagaccctgtctcaaaaaacaaaaccagctgaccaaacaaaccaaaaggccttagagttcaagcacgtggtttagaggtggtggatctcagtgtcagactctcagtgggttcaaatcctggccctgtttcttctaggttgacgagcccaagcaatttacataaactctctggacctcagagcccttgccaggaaaggggagagttttaatagtcctgactttgtagggctgttggaaagcttaaatggactgtgcttgggaagcacttaatcactgtgcctggcgtgatcactctggctgttattattggcacccaataaatacatgctttctctttgtttccaactcagcatttagaaatgtcctacccttcaattcctgctgctatttatttatttgaagtgcgaactagctttcttattattattttagaaatcatgcagaggagaaaattcaaacagtacgaaagataatacaacaaaaaatagtagttgccttcctctccctggtttcaggcctaccccctgcagattaattagctttttttctttctttttttcttttcttttttttgcaatatgaagtcttgctctgttgcccaggctggagtgcagtggtgtgattttgactcactgcaacctccgcctcctgggttcaagcaattctcctgcctcagcctccctagtagctgggattagggcagatcatgaggtcagaaatgtgacaacagcctggccaacatggtgaaactccatctgtactaaaaatgcaaaaattagccaggcgtggtagcaggcgtctgtaatcccaggtacttgcgaggctgaggcaggagaattgcttgaactcgggaggtggaggttgcagtgagccgagaccacaccattgcactccagcctgggcaacaagagcgaaactccgtctcaaaaaacaaacgaaacatcaaattcctgactgtgtatgctgcttgcaggttatatatgaccaggcctggttctgtatctgtaaaatgggttacgttatagtacctgagtcctagagttgtgtgtgaggatgaaatgtaatgtgaaacacttagagtggtgcttggctgatgcaactaatgaatcttccctcttactctttctatagacagaagaaggcggcacaggtttcttcattgcttttcgccctttgctgaaatgtcatcttggcccagaggccctttctgtctacctgataaagaactagcacctgcccacccaccattatgcttcacccactttcttcttcttcaagccatttgctcccattgggcatacatagagttgttttttttagctgttggtagttttggccgctttgcataaagtgaaattgtgtgagagtggagactttattttacttccacatgaccttggcccatggtagtagtcgctgataaatgtccactgagcaataagaacccgactgttgcaagttacttatttatttatttttgagacagggtctcagtctttcacctaggctggagttcggtggtgcagtcatagctcactgcagcctcgaactcctgggctcaagggatcctccttcgtcagcctctggagtagctgggactaaaggcaaacgtcatcacatctggctacttttaaatttttttatttgtagaaggtggggagtctcactccattgccacctctggtctcgaactcctgggctcaagtgatcctcctgcctcggtcccccaaagtgttgggattacaggtgtgtaccaccacgcccagctaagtttttttttttttttttttttttttgagatgcagtctcactcttttgtccaggctggagtgcagtggcctgatctcggctcaccacaacctccacctcctgggttcaagcgattctcctgtctcagtctcctgagtagctgggactacaggcgcacgccaccatgcccggctaatttttgtacatttagtagagagagggtttcactatgttggccaggctggtctcgaactcctgacctcatgatccgcccgcctcagcctcccaaagtgctgggattacaggcgtgaacccctccacccggccagctaagtttttaaatttttttgtagagatacagtctcactgtgttgcccaagctgatctgaaattcctggcctcaaactatcctcctgcctctgcctcttcaagtgctgggaaatataggcatgagccactgcacccagctggttgtgagttattgagatggttgaattgggagtggatgctcaggcctcagtggaacttgtggtacacagtatgtcctcattacctcccatcagtggcagttgagattcataatcactttttctgcctgttgtctgccccatcctctctgtggccttccctcctgtcctggagttggctggctgggtcccctggcagggctgcatgcgttatccctgcaggcctgcttgccttatccctgcaggccctggtggagcatctgtgcagaacctgtgccatccagatgggagcagtaagggtgtagggcaaagttagtgagctgcccggtgcacgaggacttccatgataatcagggctgaaccaggaaggcaggtcaaggccagggtcatgtacagaaaggaggtcagcaccaggatcttgtatgggaagacttagatcaatgcctagtgccttagtcatcatcattcagcccagaaaacatgacgctatgcaacaggaattttatgaacacacaaaggtcaggggccactcggacttggacggggtccccaactctttgagtgtcagggctgagggcatggagacacaacttgatcaagctggtgaagtgtccagcaaggagaagcctctgttggagggagccgggagctggggaggacatgcgctttctcttttttttttttttttgagacggagtctcgctctatcgcccaggctggagtgcagtggtgcaatctcggctcactgcaacctctgcctcctgggttcaagcgattctcctgtctcagcctctcacgtagccgggactcaggcctgtgccaccacgcctggtgaatttttttgtatttttagtagagacggggtttcaccatgttagccaggatggtcttgatctcctgacctcgtgatccacctgccttggcctctgaaagtgctaggattataggcgtgagccaccgcgcccagccgacttgcgctttctctgtaaagatttctgtgggccaggttccccaaagggcaggccctgggccagtgcagtgaccggtgaccgtgttcaggactcatctcttgtggctgaattgtgtgtctggagagttgggtccttctgattctgctcagagcgtggtgggcctggctggatttccctagattaggaagcagcctcgggtagctgtgattctttgagttgggaacagcaagtggcctgcagactgccagggaatcgtcccttccttgagcctttaggtattgcccattattcaccgtttttcccagaagcctccagtagtgagagtcgcacttcttacctcctggagttgttaaagtaaagaaggacacattagggtccctgccggtaaggaacatccaggaggcctcgataccttttttttttttttttttttttccctgagacagagtctcgctctgtcacccaggctggaggacaatgacctgatctctgctcactgcaacctccacctcctgggtttaagcgattcttgtgcctcagctgcccgactagctgggattacaggcatttgccaccatggctggctaatgtattttttttttctttttcagtagagatggggtttcactatgttggccaggctggtcttgaactcctggcctcaagtgatctgccctcctcagcctcccaaagtgctgggatttcaggtgtgacccactgcgcccagtcccgatactttgtttctttgagacagtctcttactctgtcacccaggctggagtgcctgggtgggacgatcaaagctcactgcagcctcaagcccctaggctcaaaagatcctcccacttcagccttctgagtaggtgggactacaggcctgcactaccacgcctggataatttttaaatttttttggtgaagacagggtcttactttgttgcccaggcttttcttgaactcctgagctcaagcaatcctcccgcctcagcctcccaaagtgctgggtttacaggcgtgagccactgtgcccggtcctcagatgatcttagctttgtgacctatgctgttggccgctgtaggggctgtgatggaggtgatgtgggggtggatggcaggggtgacccgtgttggctgctttctgtaacagtcatagttcatggtcagagtcagatttcctctcgtcatgccttccttcccttccttctgctccctcccacagccgccctttgggtctgggctggccatctggctctgagcaggaagctagcctgtgctcttcaatttgctttctgcaggggaaacaccttcctttgctcagcgtttcctgacctctccttccctggagttccggtgtccttaaatgctctctggtttcttctgtagcttactttcttgcttgaaaggacaacttttctttgtcctttagacttcttatctctgggcaatacagtggtggtggcagtggtgattattatcaactattagtatctgctactacggtttattgtctctagactgtatcagcacctgtcacacattgtcccattgaatcctctccagaactcttccaaatgatgtgttttcctgacttttaaaaaaattaaaaaaaaatttttatatttttttgagacggagtctcgctctgtctcccaggctggagtgcagtgctgcgatctcggctcactgcaagctctgccttctgggttcatgccattctcctgcctcaacctcctgagtagctgggactacaggtgcccgccaccacacctggctaatttgttttttaatatttttagtagagacagggtttcaccgtgttagccaggatggtctccatctcctaacctcatgattctcccaccttggcctcccgaagtgctgggtttacaggcgtgagccactgtgcccagccaaaaaaatttttttaaagaaatggggtctcgctgggtgcgatggctcacgcctgtagtcccagcactttgggaggctgaggtgggcggatcacctgaggttgggagttccaggacagcctgaccaacatggagaaaccccatctctactaaaaatacgagattagccaggcgtggtggcaggcgcctatagtcccagctactcgggaagctgaggcaggagactcgtttgaacccgggaggcagagattgcggtgagctgaaatctctccattgcactccagcctgggcaacaagagtgaaactccgtctcaaaagaaaaaaaaaatagaaaaagaaaaataaaagaaatggggtctcactgtgttgcccaggctggtctagaattcctgggctccagctgtcctcccatttcggtctcccaaattgctgggattaaatgtgtgagcctctgtgcccggcctctttctctctctctctctctctctctctctctctctctctctcctctctctctctctctctctctctgtctctttctttctttctttctttctttctttctttctttcagcctgagtctcgcttgtcgccaggctggagtgcagggacgatcgggctcactgcaagcctctgcttcccaggttcaagtgattcttctgcctcagcctcccgagtagctgggactacaggtgcatgccacaatgcctggctaattttgtattgttagtacagacggagtttcaccatattagccaggatggtcttgaactcctgatctcatgatctgcccgcctcggtctcccaaagtgttgggattacaggcgtgagccaccgctcctggccttccttttttttgaagcaggttctcactctgttgcccaggttggagtgcaatggtgtgattatgtctcactgcaggtggtctaccttttcccaaggctcaggtgatctcctgcttcagcccactgagtagctgggattataggcgagttcaccatgcctggctaatttttgtgtttctagtagagacgggtttcaccatgttgtccaggctggttttgaactcctgggctcaagtgatccacccgtgtcggcctcccaaagtgccgggattacaggcatgagccaccgtgtccagcttttctgactctttttacttatcaggagactgaagcttggagaaattaagtgacttgcccaagttcacatggggttaaggcctgaatttgaatctacatctgctcaattaggaagtgagtggtcatagctagtctctacctggatggattgttgtttaattgttaaattttttcaaaataattttaaattattttattaaaaaagagggtatcattatgtttcccaggctggtcttgaactcctgggctcaagtgatcctcctgccttggcctcccaaaatgctgaggttacaagtgcaaactactgtgcctagccagattattacttaacaaccaaaacaaaggaggaaattgacggtggacaagtaagaagatcattgcaaaggttgggggcaggttgtttggggagtgtggaggaagctttttaaatgaggtacctgagttggattttgaaggatgaataggagtttgttaggacagaaagacattgcagagagaggatctagcaagaggtgactgaagaaaccatttatttgaccagcagttggggaatgccttgaaggcaggaaccacagcctttcagaatctccagtgcctgcaacagtgtctagaacattatctgacaacaagcttggtaaatacttctttaagtaaatgcctgagtaaggcacatttggggaacagggtgggagaaattgtaggagaagtagatgggacttgaatgtagaaggaaggcctcatggatcactgcaagggttggttatttttttttattttttatgttttgagatggagtctcgctttgtcgcccaggctggagtgcagtggcgcgatctcggctcactgcaagctctgcctcccgggtgcacgccattctcctgcctcagcctctccaagtagctgggactacaggcgcccgccaccacgcccggctaattttttgtatttttagtagagacggggtttcactgtggtctcgatctgctgacctcgtgatccacccacctcggcctcccaaagtgctgggattacaagcgtgagccaccgcgcccagccagggttggttcttaaaagccaatagggagccatgggaagttgtttcccagcagaagagagaaggccattagatctgccctatttattaatgcaaatatctaagtctatgaatcttcctctgagcaggaaaacgtgattgcttttaaatccatatggaaagaccctcagttttactcatgataaagagaaaaggaacttaaactacacagagatatttttcacttcagattggcagaggtcggaaacttgttatctgctgtgctttgtgaagtaattgcctttgtaccttatcagctggagtatgaattgatgttccctatttggagggcagtgtctgtctaaatgttactgtaggcaccctttgacctggcaggttccttttttgaaagtttatatatatgtgagacagagtctcattatgttgcccagggtggtttcaaactcctgggctcatgggatcctcccacctgggcctcccaaaatgctggagttacagatgggagccaccacacctggcagagaaagtgatcttatcaacactcttgcttgagtgtgaaattcaattgtttattcaatgctgcattgtttgtaagaggaacaccaatgccaagtccccaggagaccgatggaagtcaagttcatccctacaatagaatacaaagcagccgtaacaaagagtgaggaaactgttcatgtatactgcgggatgatctttannnnnnnnnnnnnnnnnnnnnnnnnnnnnnnnnnnnnnnnnnnnnnnnnnnnnnnnnnnnnnnnnnnnnnnnnnnnnnnnnnnnnnnnnnnnnnnnnnnntatttttgtataaaatattttctgaaagaagacataagcaacccatgatcattgcctctagagagaggaactgaggggagggccatagggaatggaatgagaagacttgtcccttgtacctctttgttcaaaagaaatatcaagaataaaacacatctatgttactgataaagatagtttccaaaggctgtgtgcggtggttcacacctgtgatcccagcactttgggtggccaaggcgagtggatcgcttgagctcaggactttgagaccagcctgagcaacatggcaaaaccccatttctactaaaaatacaaaattagctgggcatggtggtgtgtgcctgtggtcctagctgctcaggaggctgaggtgggaggattgctggagcctgagaggttgaggctgcagtgagctatgattgcaccactgcattccagcctgggcaacagagtgagaccttgtctcaaaaaaaaaaaaaaaagttcagtttttaatattagctaagtaaaaaaaagcaaggtatagaatggagtatcgtagtgccttttgtggcaacaaaataggtcgtatttggaatatatctggaagaatgtaagatgttagcaatggtagcttgcctgtagggtagcaatggggggctgttaatttggggagaaagacatatttttcactgtatacctttttgagtaatttgaaagagttttagcacacaaatatattacctattaaaaataattacaaagagagggagacatgggtggatgcatggatggatagttggttgggtagatggatacatagacaggtggatggattggttggtggatggatggatgaactgttgggtgggtagatggattgatgggtgaatgaattggtaggtgggtagggtggatggatgaattggtggatgggtaggtggatggatgaatgaactggtgggttgctggatgggtggatgaattggtaggtgggtggatggatggattgatagggtgaatgaattggtagctgggtagggtggatggatgaattggtggatgggtaggtggatggatgaatgaactggtgggttgctggatgggtggatgaattggtaggtgggtggatggatggatggatgggtgaatgaattggtaggtgggtagggtggatgggtgaattagtggatgggtaggtgcatggatgaatgaattggtgggttggtggatgggtggatgaattggtaggtgggtggatggatggannnnnnnnnnnnnnnnnnnnnnnnnnnnnnnnnnnnnnnnnnnnnnnnnnnnnnnnnnnnnnnnnnnnnnnnnnnnnnnnnnnnnnnnnnnnnnnnnnnnatgtgtacatagatattctctggctatatagggaggactggctgtggtggggaacactgactgtggtggggagcactggctgtagcggggaggactcagtaggacaaggagaggctggaggcagtgaagacttaggaagcagttgcatagtcctggcaagggaataatttggggctaggatcaggtcaattaaatgtttaacattggaactatgtctcttgtatacataactgcatatgtcaagtcttggtatcgttttctttctagcaggggcacattcctttggaatgagcttttactggcaactgctcagaagctgttctgtatataatgaccaccaacagtttaatccttttttcagccatcacctcaggaattaacagtagtatgaaatcaattaaaataatcagtctttgagatgtcatgccttctccacgatcaacttcttctttacaaggctgtgttccaaatacgccaggccaaaaagacgtgaactttgtcctttttagggtttgtgtcttgatgtttcctggctaaatctctttgtatgtgttggccttgtaaggtttactttttttttttcttttttttcgagatggagactgtgttgcccaagctggagtgcagtggtgcagtctcagctcactgcaacctttgcctcccgggttcaggtgattctcctgcctgagcctccctactagctgggattacagacgtgcactaccctgcccggctaatttttatgtttttagtaaaatataaaaattatgtttttatggggggttcttgccatgttggccgggcttgtctcagactcctgactgcctgcctaggcctcccaaagtgctgggattacaggcatgagccaccgcgcccaacctaataactagatctctttaattattggaacatgtatattttgatcagattgacacttttttttttaagtgaagtgatcttatttccctcatttctcatttttaacttttttttttttttgatatggctttaaagctctgtggagctgtaagggtctgggttccttgacactccatgggggtctcaggtgatcgtgggagggctgttggaatcagagctatttggagggtgcataggccagtaggatgggaaggctgtgggagaagtgggctttttggggaccgcagccaaatggacaactgggcctaatctaaagattggcccctcccagctcctactgatggtcatgtaacaggaatggggcccagcaccaccagattttctgatttttttttttttttttgagacacagtcttgctctgttgccaggctggagtgcagtggcatgatattggctcactgcaacctccgcctcctgggttcaagtgattcccctgcctcagcctcccaagtagctgagactacaggcatgcgccaccatgcctggctagttttttgtactttagtagagatgaggttttaccatgttggccaggatggtcttgatctcctgacctcgtgatcctcctgcctcggcctcccaaagtgctgggatgacaggcgtgagccactgcgcccagaagattttctgatttttaaagttatgccagagaccgggcgtggtggctcacgcctgtcattccaacactttgggagactgaggttggcagatcacctgaggtttaggacttcgagactagactggccaatatggtaaaaccttgtctttactaaaaattcaaaaaaaannnnnnnnnnnnnnnnnnnnnnnnnnnnnnnnnnnnnnnnnnnnnnnnnnnnnnnnnnnnnnnnnnnnnnnnnnnnnnnnnnnnnnnnnnnnnnnnnnnncaacaagccatctatgggccaaactgtgggtggggaaacctattttgtacttcttattttatccgattgaattgtggtggagataggaaattgagaccccaaaaagggtagtaagttttcccaaagttatttagtcagttgccagattatggcttgaattaaatttaaattcttcagctgggcatggtggtgcacacctgtagtatagctgcttgggaggcagaggtgggaggactgcttgagcccaaaagttcaaggcacaggaagctgtgatcttaccaccacacttcagcctgggcaacagagcaagacctcatttcaaaaaaagaaaaaaaaaagaaaaatttaaattcttcattacagaacagctgatggtggaggtttattcttgggcaggtacatctgatctatttatgtatgtatctatgaatttgtctatttggcgatggctctttagcaaaatacaggctttttttttttaagtaaaagtaattgaaacaaaattgtttccaaggctggacagctcagtggcaaaatgcagacttgaacaacattgcccgagtttgaattcagctccagagcttaccagctgtgtgatactggacacagtatttaacccttctgtgcctgagtttcacatctgaaaaaggagatgataaaaataattacagaatgaaaggagataatacacatgaggtacttagaataaagcctggcatacagaactgcagtttggttgttatccgtggtggtggcggtggcggtggcggtggcggtggcggtgatggtggtggtgatggtggcgatggtgatgatgatggtggtgatggtggtgatggtgttggcagtgatattggtggtggtgatggtcatagtggggaaggtgatgatgatgaatgaagatgattagaaagtcctcagttcacaaggtcagagtgatctagatgacacagggctcttcggttataagagaatatccttcagggttcctttaaatggctctctccatctttcgtactacagtgggacttgccacaggttctggggactgttaatgtgagatgagatgctacatacctttttgttgttggtgggtttttttgtgtgtatgcactgttgtgtgtgtgtgtgtgtgtgtgtgtgtgtgagagacagggtctcgctctgttgccccaagggtgtagtacagtggcatgatctcagctcgttgcaacttccgccttccaggctcaggcactcctcccacttcagccgcctgagtggctgggaatacaggcacgctccatgctcagccactttttgtgtttttcatagaggcagcatctcactatcttgcctaggctggtctcgaactcccagcctaaagtggtctgcccacttggcctcccaaagtgctgggattacaggcatgagccactgcacctgacctgtatgctcctgttaagagagctttatttttatttatttattttgagacagggtctctgttgctcaggtgggagtgcagaagacaccacatacctttatcccttgttcctcatttcttagtctttctggctactgatctttttagtttgcgtgttcatcctgaaaggtccttggatatataggagccttgtctgtttcttcaaaccccgtggcagctggtttcatgctccaggcgagctcctgtcctctggggtgtgtcctgctgacccctcgcctgtgtttgtgttcgcaggactggaatgtcacgtggaataccagcaaccccgacttcaccaagtgctttcagaacacggtcctcgtgtgggtgccttgtttttacctctgggcctgtttccccttctacttcctctatctctcccgacatgaccgaggctacattcagatgacacctctcaacaaaaccaaaactgtaagtcactggggggtttcgttgtggggggtgggaaggtgcacctggacggggagtggtggttggtgataactgacatttctcttctacttagttgaccctaagttccttcttctagaaggcagaagaataatgtgggaggtgaaaactggagctctggagacaaacatgggtacaaatctttgctctgccgcttagtatttggcctcgagcaaattttttaacctccccaagcctcagtttccctgtttatgcaataggaatgataggcttgttctcaaggcattcctgggagattatcagctcttcccctcttactgagccgatctcctttttatttaattaaatatatttatatagattttttctggccaatttttaatttattttttgtagagaggggggacttgctgtgttgcccgggctggtcttgaacacctggcctcaagcagtcctcctgccttggtctcccaaagtactgggatgctcagtgtgaaccaccacgcctggcccctaattttttttttaagttggcttttattttgaaataatttaaagctacaggaaaattgcaataatgggccaggcgtggtggctcacgcctgtaatcccagcactttgggaggccaaggcgggcaggtcaggagtttgagaccagcctgaccaacatggtgaacctgtctctactaaaaatacaaaaatgagctgggtgtggtggcatgtgcctgtaatcttagcaacttgggaggctgaggtgggaggatcccttgaacccaggaggcagaggttgcagtgaactgagatagtgccactgcactctagcctgtgcaacagagcgagactccttctcaaaaaaaaaaaaaaaaaaaaaaagttgcgatgataccaggaactgctgcctgattttctctatccatcactcatagtcactgtttcctgttttttttttttttgttgttgttttttgtttttttttgacacaaggtgttgctcttttgcccaggctggagtgcaatggtatgatcacagcatactgcaaccttgaactcctggctcaagccatcctcctgcctcagctttttgagtagctggtagctgggactgcaggcatacaccaccatgcctggctaatttaaaacaattttttgtagagacagggtctcgccttgttgcccaggctgttgtcaaactcctggcttccagtgatcctcctgcctcggcctcccaaagtgctggtattacaggcatgaatctggcctgtattcactgattttttaatcttttgctacatttgttttatcatgagcttttgttctctctctctgtatgcatgctataatttattttttctgaatcatttgagaatggatgcaccttgaaacatatcccacccgtagagggctctcagtaaatactggttgaatgaatggttgtcgtggagggctttcttgtgcagtgcgccggagttgcagctagagatgagctgtgagctgagctcttgagtgttcaggcaccggggagcatggtgaccagacaaacagtcctgttggaggtagtggggcgtagcaggctgattacagaccatcacgtgccggcctggatgccagctcaccataccgaggacttgtccttattccagtggatatgtgccatgtcctaggactgtggctgatcatttgaaggctggctggttctcctatccctggggctgagctgttcgtgcaggccctgggggaggttccagggcggtctgttgtaggatatgtatgtgcttctcttccaggccttgggatttttgctgtggatcgtctgctgggcagacctcttctactctttctgggaaagaagtcggggcatattcctggccccagtgtttctggtcagcccaactctcttgggcatcaccatggtaagtaggagctggctgtgacccctgggccatctgctgggctcagtggagaccaaaagtaataactcgtaagactagaatcatagttttttaaggcaatgatcagctggagctgggatataaaattaaaatgtaagcctttgttttttttttagtttttttttaaagacatgagatctcgctttcatccaggctggagtgctatggtaccatcatagttcactgcagcctcaaacttctggcctcaagcaatcctcctacctcagacttctgagtagttgggactacaggtgtgtgtcaccacgcccagcttatttttggctaattttaaatttttctgtagaaatgggatctcactgtgttgtctaggctggtcttagactcctggcctcaagtgatccttccagagcactggcattataagcatgagccactgttcccagccccagctgcagtctttggatggggcatgtgttgtccagtttgccacagtccccaccatgccctattgtcttccctgccactgattgagtggcagatgcccccttttgttgcgtttgccacactttgctcttgcattggctactttggtcacttatatactaactgcctggggtctaatggccttgagttttcactatctggcatagggggtgggttgctaagctaaataggaaactgctctgtcccgggggatacacaacttagtgagtgacagagacaaggaaacaactttattaattacagctggtgtgtattgagcacttactatgtatgtacctggcagtattcttggtgtttcacgtgtcttgaaattcattgaattttcacaacaaccctgtgagatgggtcctgctttgttcccatcttacaggtgaggaaaccaggcaagagaggttaagtgtcctgctcaagatcacaccactaatgtgcagccgagtcaggggtgggaccccagatgccatgcttttagcccctgcaacctgcagcttctgagccctgaacagagagttctcggagagtgtagcccttgagtattgtaaaaagaggagggaggctgggcatcgtggctcatgcctgtaatcccagcactttgggaggctgaggcgggagaatcacttgaggtcgggaatttgagaccagtatagccaacatggcaaaaccccgtctctactaaaaataaaaaaattagccggcgtggtggcacacgcctgtagtcctagctactcaagaggctgaggcaggagaattgcttgaacccgggaagtggaggctgcagtaagccgagatcgcaccactgtgctccagtctgggggacagagcgagacctcatctcaaaaaagaaaaagaaaaaaaaaaggagagaacaagtttaaggcaggacattctgagcagggtgaacagtgtgtccagggaggggtggaaggttaaggggaggatgcaggcagggaggacaaggtgttcggtgaaggaacacggtgtgaaggttggggggatagagtggatgtgacagaggggtcaggaaagacaacgtggagccaggttgccaaggaccatgaatctttatttttctaaattaatttttcattttttaaattttagagtcagagtcatactctgttgcccaggctggacttcactggcgtgagatcacagctcactgcaggcttgaactcctgggctcaaatgatccttctgcctcagcctcccaagtagctgggagtgtaggcatgcaccaacatgcccatctacatttattttttatttatttatttttttatttttccccccgagatggagtttcgctttgttgcccaggctgaaatgtaatggtgtgatcttgagttgccgcaacctctgcctcctggattcaagcgattctcctgcctcagcctcccgagaggctgggattacaggcatgcgccaccacgcccggctgattttgtatttttagtagagatgggatttcaccatgttggccaggctggtctcgaactccggacctcaggtgatccacccacctaggccccccaaagtgctgggattacaggcatgagccaccaccccggccagtttgttatttttgtagagacagggtctccctatgttgcccaggctggcctcaaactccttgtctcaagtgatcctcctgtctgggcctcctaaagtgctaggatantaggtgtgagccaccatgccctgcccagaccatgattctatatagcacacatatgtgctgtccactctctgccaagaactgtcctaatccctttattaacccttttacgttgtaaataaggtaagcaaagtgtggtacagagaggagaaggactggcccaaggtcacctggtcagtaagtggtagagccagcttccagtctaggccccagcgtgtagcctggcacctgctttacgcctggctctcctgctgggtttgattcccctttgtgtcctcagagcctggccctgtgcctggcatgcagtaagcgttccataaatgcatggagggaatgagagagtaaagggctttgctttgtcctgaattcgggtcttgggctctgtgttctggcagtggggtattagagtggatttttttttttttttttcaatttcactataatagagacagggtctttccatgttgcccaggctagtcttaaactcccgagcccaagtgatccctctgccttggcctcctaaagtggtgggattacaggcatgagccaccatacgtggtcagctgtttttgacttgagtaggtcatcctcccttaacattccttgttcctggtcttttttttttttcctttgaggcagagtttcgctcttttttcccaggcgcaatggcatgatcttggctcactgcaacctctgcctcccgggttcaagtgattctcctgcctcagcttccccaataactgggattacaggcacgcgccaccacacctggctaatttttgtatttttagtagagatggggtttcaccatgttggccaggctggtctcaaactcctggcctcaggtgatccacgtgccttggcctcccaaagtgctggtattacaggcgtgagcaactgtgcctggccgttcctggtcttttgatcgttcatttatgcctctgtcaccctgggggaaacaggggtgatagtctgagggttggggcttttgactcctcaggggactctgagctgggctggccaagaggtgaactggcctgtgagatcctcagcctctctttatctacctgagatctctgggatggaatggaggaccaccagctcagctgtgaatgtgtcagaaacattctgactatatcccagggaaccaggatatgcaggcactggtaatatgggacaggatgcagccagcacatgttttttttttttttctttgagatagcgtctcactctgtcgcccaggctggaatgcagtggcatgatctcagctcagtgtagcctccgcctcccaggttcaagtgattctcctgcctcagcttcccagctagctgtgactaaaggcgtatgccaccacgcctggctaatttttgtatttttagtagagatagggtttcaccatgttggccaggctggtctcaaactcctgacctgcccgccttggcctcccaaagtgctgggattacaggcatgagccactgcacctggctgatttttttttttttatccctactctgtatcaagcgttggagacacaaccatatagtctagctgtgcaaacagacattaaacaaatgattcctcaaaaggcacaaagtgtttgaacgtctgcagagtgctgtgtgagggtgaaggcaggggagcttggtttggtctggggcatagccaggcttctctgagggagggatggtggaggtgaagcctgagaatgagcaagttgttaaaaagcttaaggggctgagggcagaggaccagctgcggagaaaagcacatgtaaagtcctgagggtcacagggaaaacttgagagttgtgtgtggctggagcagagatggccgaggcagagagcaggggcgatggggcagaggctgaccccgggaacgttgagcatcagggcaagtgggttttgttttctgtactgggttctctgcctgttcttttaaataaagttttattggcatgaaggcatgtccattcattaacatcttgtctatggccactttcacactgcagtggcaaagctgagtagttttgatgtagtctatggcccatgaagtccaaaatatttattacgtggtccattaagaaatagtgtggctgggagcagtggctcacacctgtaatcccagcaccttgggaggccaaggcaagtggatcacctgaggtcaggagtttgagaccagcctggccaacgtggtgaaaccccgtctttactaaaaatacaaaaattagctaggcatggtggcgggcacctgtagtcccagctacttgggaagctgaggcaggagaatcacttgaacctgggaggcggaggttgcaagtgagctgagattgcaccactgcgctccagcctgggtgacaagagtgaaactctgtctcaaaaaaaaacccaacaactcctgtcttgtgcttctctcctcagctgcttgctacctttttaattcagctggagaggaggaagggagttcagtcttcagggatcatgctcactttctggctggtagccctagtgtgtgccctagccatcctgagatccaaaattatgacagccttaaaagaggtaagtggcagtctccttcctcatcttccttcagtggacccggagggagagatgctgggtccctctggcttgtgtagaagtcatgcgttgccatgggaaccaggggctgggtaccacatgcacctagcttctcccttggtgactttcctaccccaccaaatcctcactaaatcagccccagccttttttctagcacctcctttccccaggggcctgatttgtctgtgttgctccaaggggctcccatgggacctccaagggcaggagctgtgggccgatgccaggctggccccatcagcaggaaacagcaagacaggcggctccaaattttgccaggctgggatggagccgagccgggaacggtgtttgcagagtgactgttcccctgggggaccctaggcttgtcctcgcgttacctttgtcccatcagttgctgctctggctggggaagttgtttacattggctgctgtgtgctgctgctaggaattttgaggagtgtgcacttttttttttttttttttgctgttgttgaggcggagtctcgctctgtcaccaggctggagtgcagtggcacgatctaggctcactgtaacttctacctcctatgttcaagcgattctcctgcctcagcctccccagtagctgggaccacaggcacgcgccaccatgcccagctaatttttgtatttttagtagagacggggtttcaccacgttggccaggatggtgtcgatcacttgacttcgtgatccacccgcctcggcctcccaaagtgttgggattacaggcgtgagccaccacgcctgacctggagtgtgtgcttttggaataacctgctgttcctgccatcttggagctaattagagactggcatgaggcaaaggaaggaaaagaagctgaacatttgactattgattgcctacatattattatgagtgatagcagctgatgctgattgagttcatgttttcaaagtgcctcgcaggggactgtgtatgtgtcacgaataatcttcctgacctcttgcagtgacttggacagaatttctcagcctcagcactaatcgacattttggattggagactcgttggttgtaggggctgtcctgtgctttgtagacatttaggggtgtccctggcttcccctgactgggtgccataacactcccaagttaccacaaagaagatatccccagacactgccagatgtttcctgggaggcagaatcacccctggttaagaaccaccggtggtttataggtggggaatctgaggcacagaaaggttaaataagttgacaagatcccacagccagtgtgagagagccaggccttgatacagctctgtttcactcccaagccctgtcttcctcccatcaggcagcggtgagcagtgagactacccgtgatggagccggctttctgccattacatcccggggggagctgggagcccctggggagcctgcagtgtccctgtggctgagtgggtttctgccacctgctctcagaatgtgatcttggttttttttttttttttttttttgagatggagttttgctctgtcacacaggctggaatgcagtggcgtgatctcggctcactgcagcctccgcctcctgggttcaagtgattctcctgtctcagcctcccgagtagctgggattacagttgcccaccaccacgtctggccaatttttgtatttttagtagagacggggtttcaccatgttgaccaggatggtctccaactcttgacctcaggtgttctgcctgtctcggcctccaaaagtgctaggattacaggcgtgagccaccacacccagccccagaatgtgatctttttcttccttccttccccaccatgtaggatgcccaggtggacctgtttcgtgacatcactttctacgtctacttttccctcttactcattcagctcgtcttgtcctgtttctcagatcgctcacccctgttctcggaaaccatccacgaccctgtaagtgtgaccacagatgagtgtgtgtgcgtgtgtgtgtgagagagatgcgtgacacagtaccagctaacatttcttagatccatccaggatctcgttccagcctccctcaacccctgatacagggaatatcatcccacctactttacagatggaaaaactgaggcttagatgtggctgggggagctgaaggagagaatctgctttgtcattgatgaactgctgtcttgcaggcctgtaggtttctcacttggcatggtgattttggaaaatgtgagcagataattacaaatcaggtattttttatgaattctagctgtccagatgttctggaaaagtaaagttctgacagattaggcctataatcctacagggcagagctgaggagttgctggagtccccggcactccctgttgtattatactggcatgctttcctcacttgtggcaaatgcctggccccctgagggatttgagtgtgagatccttggtctattttgtcagtttcagagaaattctgtaaatatggaaacttatcagtgaggagtgtagagatggacaccgtttctgctagtagaacaaaagggaacactttattaactttcccttaattcttttcttctttatatatgagacaggggtttgtgctctggttgcctaggctggagtgcagtggtgtgatctcggctcactgtagtcttgacctcctgggctcaagcaatcttcctacctcagctttctgagtagctggaattacaggcacacaccaccatgcctggctaattttttttctttcttcaacttttattttaagttccagggtataggtacaggatgtgcaagttcgttacataggtagatgtgtgccatggtgatttgctgcacagatcaacccatcatctaggaatcaagcccaggatccattagctattcctcctgatgttctccctacacctgctccccaacttggcttacttttaattaattaataattaaagatggggagatggtctcaaacccctgggctcaagcgatcctcttgccttggcctctcaaagtgctgggattacaggtgtgagtcaccacgcctcgcctattctttatttttttaaatagagatgggatcttgctgtgttgcccaggctcatgtgcagcttttgataagagagatctgggaaggcctgcccagaaaactgcatgttgagcgggagacctagaggggtgagttagtgggtggaccaacacctagaggaagagtgttccagcagaggggaataagtacaaggccctgggttggggaggtctggagagaacaggcaatgaaaaacgccaggcacagcaggagaaggctaagagccacgtgggtgcctgagaggtgggacacgccccttgtgagccagatgagctgtttggttttattgtgagtatgggccagggaggccttggagcacctatttgatgctgattcatggctagtcagctggtaatgggcggattgcagtgggagaacttttcacctctgtggttctgttgggtttggcctaaacctctgtgaggggcagaggctcaccttgtgggtgacgaaagggcttggtgggcatcagtatggaggaggaggttgatgataactaagagattttagaaacctatgtctcaggccaggtgtggtggctcacacctgtaatcgcagcactttgggaagctgaggcaggcagatcagttgagttcaggagttcgagaccagcccagccaacatggtgaaatgccatctctgctaaaaatacaaaaattagccaggcatggtggtgcatgcttgtaatcccagctagtcgggaggctgaggcaggagaatctcttgaccctgggaggcggaggttgcagtgagcagagatcacaccactgcgctccaacctgggtgacagaatgagactctgtctcaaaaaaagaaaaaagaaatgcatgtcccagtgtatgttctgaggagtcccgtgttggtatttccttgcccaaagaggagctgggttggagaaatgagcaagtgcacacatctgtgtatgtattcctgtgcatctgtgtgtacgtgtgcatgtgcctgcttgtgtgtctcggtagtcataggcatgtatatgcgtgtatgtgcttatatgtgaatgtgtgcttgtgagtgtgtttatgttcatgtatgtgtgtgttagtgtgtgatgtgatgnnnnnnnnnnnnnnnnnnnnnnnnnnnnnnnnnnnnnnnnnnnnnnnnnnnnnnnnnnnnnnnnnnnnnnnnnnnnnnnnnnnnnnnnnnnnnnnnnnnnaaagttttaatggaacacagccactcgcgttcatcacatagtgtctacaggtgtctggagctgcagcagtggagttgtgtagttgctacagagactgtagcacccacaaagtctaagatacctaccatctgaccctttacagaagaagtttgtccacccccctggtctaagcatttctttagctctgatgactttttagcttccttttttgtcccctttccatttgcaggcattctttcttcctatgcaaggcaaggacgggaatcgacatttattagatgcttgcggtgtactggctagcactatgctaagttctttatatgcatgtctcacttgactctcacagcagtcctggtgaacttggtactatttttctcattttacagacaaacaatcgcagacataagtgccttgctcgacctgagtagtagagcagagattcgaactcacgactggctgttgtgcacaatcatgtcacttcgcttggttgtaactgctgaatgggagggtcttggctaaataatggctttgtgttaggctagaggcttcacgtggcagtatccaccttgtaacctcagtgcctaagacacagccaggcacacggtgggcctgtagtggtaatttattgttgtgttatatggggaggtgctcagtacatgtggcacgtatattatgtcttgcataagggtgaagtgtgcatgaggcctcacaggacatcagattaagctgcttctctgccttcatcctgttcaagtattaccagcaagaaagaggaaggggactgatgtatgcacagatgttctgaaggcttggcatggtgtcaagagccttatttttttttttaatgttgcattttggggggttaaatatatgtaacctaagatttgccattttaaccattttaagtatgcaattcagtgatgctaagtgcttttaaaaatcttgttcaaggccaggtgtggtggcttacacctataaacccagcactttgggaggccgaggcaggtagatcacctgagatcaggagtttgagaccagcctgaccaacatggtgaaatcccatctctactaaaaatacaaaaattagctgggcatggtgttgagcacctgtgatccctgctatttaggaggcagaggcaggagaattgcttgtgcccgggaggcggaggttgcagtgagctgagatcgctccagtctgggcaaacagactgagaccctgnnnnnnnnnnnnnnnnnnnnnnnnnnnnnnnnnnnnnnnnnnnnnnnnnnnnnnnnnnnnnnnnnnnnnnnnnnnnnnnnnnnnnnnnnnnnnnnnnnnntcagctcgtttgcagtaagaggtatttttagtcctgtctgtatatatgtaatattttccccccagcattttactatgaacattcttaaacctacagaaaagtcgaaagaattctactgtgagcagtcatatagttggtacctagagccacagttaacattttgctaaacttgctttgtcacatatctgtctgtctaaccagatagctaatcagccagccaaccggctacttttgttttgttttttgtttttgagatagggtctcactctgtctcgcagactagagtgcagtggtgtgatcatagctcactgcagcctccaactcctgggctccaatgatcttcccgcttctgcctcccaggtagcttgggccctacaggtgcacactactgtgtttggctaatttttaaattttttgtaggcgtgagggctccttatgttgcccagtctggtcttgaactcctggcctcaagccatcctcccacctcagcctcccaaaatactgggattacaggcctgagccactgaacctagtttttttgatatctgaaacttccttcgaaatatattagtattctttcatgcacccacttccaagtaaatcattagctagagtttaagatctgtttacacttctgagttttttgcttaaaatttacatacagtgaaattgctgatctcaagttagcatttgatgaatcttggtaaaggaatactttaaacccctgtcaagatatagaacactgcaaggacgccaggaagttccctcgtgccccttcatgatcagtctctgtccccacccaccaaggcctgatcttggaccgttgattaaagcgttgaaactccattttctttccatttctccgtcatgctttcagtcatttaataatcaggtgttgtgccaggggctgagctagaaagaaacagaccttgaccactgccctggaggagagatggaaggtgggtggcaggcagttgaaccaacaactgcaggatggacagtgggggctctgagggagggaagtgctgggagttgtgggggctgggagagtggtccctgactcagcctggggctccagggctagcatccagggaggagaggggatgctcaagtctaaggaatgcgaggctctggccaggtgaatatgtttggaggtggtggggtgggagggtgctcctggtagagcaactggcatgtgcaaaggtccagttgagggagcttgtgggtgttgggaatcacttggaattcggcttggctaggctgggtgcagtggctcatgcctgtaatcccagcactttgggaggccgaggcaggcagatcacctgagactaggagctcaagaccagcctggccaacgtggtaaaaccccgtctctactgatcataaaaaaattagctgggtgtggtggtgcatgcctgtaatcccagctactcgggaggctcaggcaggagaattgcttgaacccgggaggcggaggttgcagtgcgccgagatcgcgccactgtactccagtctgggcgacagagcaagactctgtctcaaaagaaagaaagaaaaaaagaattctgcttggctagattggaagggctaggatgtaagcgaaaagagaggcaagagtcagcatcagagatcaagggtgcaattatgtgtcacaataaggacttggaattttttgtttgtttgtttgttttgagatggagtttcactctgtcaccaaggttggagtgcggtggtgccatctcagctcaccgtgccctccacctccggggctcaagcgatcctcccacctcagcctcgcaagtagctgggaccatagttgcgtgccaccacgcccaagtaactttttctgtttttggtagagatggggtttctgtatgttactcaggctggtcttgaactcctgagctcaagtgatgccctgccttggcctcccaaaatgctaggattacagggatgggtgaaccaccacatccagccaggacttggaattttaaccctactgtggtgggagctgaggaaaggtttttcaccagtggaatgacacactcaggttggacaggttgtggaagatcctcaggctcaaaggaagaggatacattggacatgggggtgaggtcggtggcacttaaaaagcctttgcaggcacccaggcaggtagagagggaggctgagccaggatattcccctgtgcccactacagcatcaaaaaccagaaaaagggccaggtgcgtggctcacacctgtagtcttggcattttgggaggcttaggggggaagatttcttgagaccaatctggtcaacatagtgagaccccatctcttgaaacaaaaaaacaaagaaaacagacaagttgatgggcaaagggcatgggcaaagattctggggtgtgctccagtagaggaaacggaggtcctgggcagggaggcattttgcacagttggtaagcaacagggcaaacaaatcaccagtgtttacgttatactggcaaatctcttactgctggacatttaggctccgtctaataataaggataacagctgggtgcactgtattatttatttagtcctcacagtagggcaggatgatcagtctccccacttgacagatgaagacactgagggtcagagtggtgatgtgtcaggaaccctcccactgggttctcacgcttgaaacacagattgctggtccccacccacacagtttctgatgcagtaggtctgggtggggcccgagcatctgcggttcccaacaagttcccaggtgccaccgatgctggtgacagagctgcgtttgaggatcactgctctaaacattattgctgctgcacgcattgcctcctgctgggtgcaggggttgtggggggcactttggcagtgcagagcggaggtaaccagcagaaaacccgttagaactaaaagctgagagtgtttctgacaaacaggtcaacatgctgaaagacccagacaaggtccttaaactaccctgcgctccaagaatcagtgcctggggctgccgtacctaattggttcaaaccacagggtttctggccagctcatctggtaccaaacgtagatgtcaatatggtggatgccaaagaacacatcactctgtttggatgaatcaggcttttcctccctctgccttcagccaggacttctctgaattgttttcatttcaaatgaaagagggaccagttcacaagctgctttcatgctatctgggacaggagttactgtatttcagtgtctgaggctgggaaaccccctggaggtggctctgtcttttgtacctagtgtgtgatgtcaaaagattctccttggtttgggttaaatgacatgctccctggattacaatccagtgccccatgattttttttcctccttttttattgtcaatccttgacctacttcagaagttagttgtctttgttgtcaagtaaggccttccacgtcagatagaggctgtttccaggccgggtgcagtggctcatgcctgtaatcccagcactttgggaggccgaggtgggtggatcgcttgaggtcaggagtttgagaccagcctggccaacatgataaaacccccgtctgtactacaaatgcaaaaattagccaggcatggtggtgtgcaccatgtaatccccgctatgtggcaggatgaggcaggagaactgtttcaatttgggaagcggaggctgcagtgagctgagaacgcaccattgcgctgcagcctgggcgatgagagtgaaaccgtctcaaaaaaaaaaaaaaaaaaaaaaaggctatttcctttttttttttttttttttttttgccagtgaaggggggaccctgtgttggcctccctatcggtcacttgagataatctgaaaatctgtgtttagatccatagaagagaggcggcctgaggagaagaatttgacaaagctctttgagtgtgcaaattagaaatggcaattgctgggcgcggtgggtcatgcctgtaatcccagcgctttgtgaggccgagataggcggatcagttgaggtcaggagttcgagaccagcctagccaacatggtgaaaccccatctctatcaaaaaatccaaaaattagccaggtgtggtggcagatgcctataatcccagctactcaggaggctgaggcaggagaattgcttgaacctgggaggtggaggttgcagtgagccgagatcgggccactgcactccagcctgggcgacagagtgagactcagtctcaaaacacaaaaaacaaaaaactgtgcagtgttctgtctgtcaatgtccttgttgcatttgcagggcaggttttctaccagtggctggggacttagttttactgggccgagggaaggttaggatttgagggtcttgttaagctggatatgggctgcatttcaagcctcccctggctgtctctatcctgcgtgttgatgccaaggctgaagaagactggatttgcaggcaaaagactgtcatttgaggcctgttttcaccccttaatcactgtgtcttggtatgttgtgggggttgaggtaggcagaggttagccaaccttttctggaaagggctggctgataaatacttgaggctttgcatcccatacactgtctgtggcaacccctaactccgctgtgtagctcaaaagctgccatactcatttataatacataaatgaatgggtgtgactgttccaatgaaactttatttataaatagctggtctgtgggccatagatgcttctgatatataaagcatctggtatagtggtgtattgtgaacccactggggttttttcccccccaaacacttgagctttattgatgtatattgacaaataaaaatggtatataggttgggcacggtggttcatgcctataatcccaggactttgggaggccgaggcaggtggatcacttgagctcaggagttcgagactagctcaaggaatagagtgaaattctgtctctacaaaaaatacaaaaattagctgggtgttgtggtgtgcgtctgtagtcccagctacctggggggctgaggtgggaggatcacttgaacctgggaggtcgaggctgcaaagagctatgattacactaccgtgctccagcctgggtgacagagcgagaccctgtctcgaaaatatatttaaggtgtacagttttatgtttccatataccagaggctactgtcactgcttctattattattactactactactactcatgttaccctttctttggctgttactttgtgccaggtactattctaagtacttaccatgtttgatctcatttaatcttcaccaccaaggaactgacccaaggtcccacagctaggaaatggcaagctgggattgagccgtgccagctagccccgtgctatgcactgcttcacacagaagctgcccctccacccctgccgccttccttttcctttgttcctttgttatcagctggccgtttccagaaacggttggttaacctctgcctacctcaaccctcagtgattaaggggtgatatcgggcctcaaatgactgacctttttcctttgttgcagctctcactgattgtaattctgattgtaattatatatttgtttgcaccgtggtttacttactgtccatcttccccagggcaggaggctgaatggggcaggggtctcgctgtctcgtttgcagctccgtccgcggcacttcacccacatcctggcctataagcaagtcctgcccatatatttgaccaataaataaatgaatcattgacagccgtgccccaccccttcctcctctctctgccagccagcaccttggtctttcacagtgggtagagggcttgggctgcaggtgaaatggatttgcaattccctgataacccacccgccgactgtgggagtgggcaggaaggtgtcagctcttccggatgaaaaaccagcctgcaatgcagtgtttctacccagcctacaaagcaaacaccactacctccacgccttaggttggagaaattccgctttacgacacagtcccatgggcctcatgtcatttgtccctcctggcagtcccgggggataggtcgagcaagcagtaggacaaacgactcccattttccaggtgtaaaaactgaggcttggaggtgaagggacttgcccaaggtcatcagctagaatatagcagggctgggattagaacccaggtctgtccgggtccacggtctgatctgaactcggcttcagttggtctggaatgcaccggctgcatctgatgatcttattaaagatctgtggctgtcagggtcctccccctggaggtgctgatttagttggtctgggttggggccctaggcacttggcacttaacaaactccttaggtgattccagtggacaggcagggctgggaacttcatcacccctccgagccccagagcggagcctgatccttagccctggctgtgtatttgaatcactggaggagctttttatttagccttttatgatggaaacataaagtagacagcctaggataatgaactaccatgagctctttttcttttctttttatttatttttgagacagggtctcactattacccaggctggagtgcgatggcacaatctcagcttgctgcaacctctgcctcccgggttcaagccattctcgtgcctcagcctcttgagtagctgggactacaggcacgtgccaccatgtccggccaatttttatattttttgtagagacagggtcttgccatgttgcccagactggtctcgaactcctgaactcaaagcagttctcccgcctcagcctcccaaagtgttggggttacaagtgtgagccactgcgcccagctgccatgagctctttaccatgcattgcataggtgaacgttttaatatgtatctctgaaggacatggatttgtttattttaaatgactttttatttcgcaatagtttggctcacaaaaagttgcaaaaataacagagttcctgttgttcattgctcaactttctctaatgataacatctgaaagataagaattttaaaaactgtaactgttgggctgcatgtgatggctcatgcctgtaattccagcactttgggaagctgaggcaggaggatcacttaagcccaggagtttgagaccagcctgatcaatataggtagaccttgtcttgacaaaaaacatgtatatgtgactgtaatactaactttaataataattcattattatcaaatattccagtaatccattgtgtttgtacaatggctcattcttctatgatatcattctttatgttttagctgggatttttttatggaaaagagtttccccttcatttctttgatcactgatcactctgtggtgatcgaataaatgactgttttcctcagggaagccttctccaaccctggtgaaccaaatgagtacatttgggaaaggtggagaaaatacttgtttctttccgctttttctgcgttcaaacaatgacctggttcactgacaacatcagatgtttctctttatttccagcgtcaatatgaaatttgtgtacataaacatgtaaggctgggcgcagtggctcaagcctgtaatcccaccactttgggaagccacggtgggcagatcacttgagtcaggagttcgagaccagcctgttcaccaacatggtgaaaccccatctctactaaagatacaaacattagcccagtgtggtggctgatgcttgtaatcccagctacttaggaggccgaggcgggaggatcacttgaacccaggaggcggagtttgcagtgagccaagatcacgccactggactccagcctgggcgacagagcaagactccatctcaaaaaacaaaacaaaacaaaaaccttgcttggtatgtttcagcctgttgtacttattctccttgtcaaagctcaaattgtccctcttttagcctgcagcggccacttctgcttggctcttgagccttttaacaatcctgttcatgcttagtttccttgttgtccggtgtgacaagatgttcttggcttaccttgcatatttcctgcccagccacttttccaagaaaaatctggaagtttaaaacaaaaacaaagcttcagtgccccagtcgcacccagaaccagcttaatcagattgcctggtgcgggtagggcccggatacagtatttttttaaattttatttttattttgtttgagacagggtccctaggctggagtgtagtggcacgatctcagcttactgcaacctccgcctcatggattcaagcaattctgcctcagcctcccgagtagctgagcttgcaggcacccaccaccacatccagctaattttttgtatttttggtagagacgaggtttcatcatgttgcctaggctggtctcgaactcctgaccacaagtgatctgcccgccttggcctcccaaagtactgggattacaggcatgagccaccacacccagccaggatacagtattttttaaaaagcacgcccagccttgaatggaaaaccactggacgagagtatgccaccttatcgggctctgtaaatgccttatatctgcacaaggctggaactttgagtggagtccttggctaaagctttcattactgcctggtgacctctcttccctctgctgctaaagcttgtgtttcagaatttagacccggatgcatccatgttgaaagccaggctttgtctgtcatcccaggagctctgtatcggtccctttccttgcctgcatgttgttgacttggggctcatcttcatttctctgggaaatgagttctttgatagcttgcttagaatctctcagtacttcccattgcccttagaatgaagaccaaaatatgtggcctgcagtgtagactgtgcacagcctccagtgtagactactcaggccccttcttggttcctggagtctaccatgctttcttctaccaccgggcctttgcacacactgctgtctgttgggaatgcgttgcctttccttgttacttagttctcatctactcacccttcaggtgccagcttgactgtctgcctcgggggcgccttctctgaccttcgtacaccagatcagcccccatgcacttactttgtctcattggtaatatttctctcccttcaggacacacatcaaggcccagaagttgtagttttgcatttgttcatgtgatcatttgatgcatgtctctctctggagcctgactctttggggctcacatcctcactccaccgcttttagctgtgggaccttgaacaaatcttttcatctctggtccccagtttttaagttaaattaaattttattttatttttattttgagacactcttgctctgttgccaggctgtagtgcagtcgttcgatcatggctcactgcaacctccgcctcctgggttcaagcgattctcttgcctcagcctcccaagtagctggaactacaggcgcctgccaccacatccagctaatttttgtatttttaggagagacagggtttcaccatgttggctaggatggtctcgatctcttgacctcatgatctgcctgcctcggtctccgaaagtgctgggattacaggcccagtttcttttaactgcaaaacagggatgatataatacttttatttatcttgtgaggtgaggatgaagattaaataaggtagtttgtgtaaagcacttagaaaagagctagctactaatagtagagaatcttggcaggtattactgatgattactgcagtagaccacaagctccatacaggcaggggtcatttctgtttgtttagatttgtatgcagggtgcttggcacaagggttgtgctcaggaaatacttgttggatgaacgaatgaatgaagtggagataatagtaataccatgtttatagaattccatgaggatataaaataatgcaagtatataagctcttggtagagtgtctagcacatagtagatggtcaataaatattcagtgactgaatgagtaaagtggggacaatagtaatacccgctcatgaggttgtcgtggggatataaggcaaccctgtagtaccttgtagaatgcctagcacatagtaggtgctcagaaaatatttgttgaatgaatgagtgaagtagggatgacgttaacaccaactcctagggttgttgtggggatagaagacaaggcaggtctatagcatgttgtattgtggttgcacatggtagacactccgttgattgaaactggaagagctgccatgaatttctttctcctggctattaggagagggtccttttggggtgcagaatggtgtggagctgacgctagtcctctggaaggaagagtgagcagctgactacttgctaagctctgacctggatgaaaagtcaaatcattcctttccctcttcctcccaaacctgtgctttctttccactagaatccctgcccagagtccagcgcttccttcctgtcgaggatcaccttctggtggatcacagggtaaggccaggccccccagacctcagggaggtggtggggagtgaatgaatgaatgaatgaacgaatgaacatgctcagctccccctccccaacttctccctcctttgctcttctgcagagttgtcttgaatctgcctgtgctggccatgtggtctcagagacaccaactctgtccggcagttccgtgaacttgaatgtgataaacacgtgagccgtgagcagctgacacctctgcagaaggctttgcctgggacagccatatgctggactgcttttgctttagcttcagatttgggtttttaaaatattaggtatagttattattgacattgtccccctcctgtcccccacgccttagaaaaataatactgtctcaccacaggaagtgtgggttaaaaaaccacatgtgcagatcagcagtgcaggagacatctagaggtaaccagtgtcaccattttagtatgccttcttctggtcgtctttcttttttttttgagacggagtcttactctgtcagtctcagctcactacaagtctccgcctcccaggttcaagcgattctcctgcctcagcctcccaggtagctgggattacaggcttgcgccaccatgcccggctactttttgtatttttagtagagacagagttttgccatgttggccaggcttgtcttgaaactcctgacctcaggtgatccacccgcatcgacttcccaaagtgctgggattacaggtgtgagccaccatgcccagctaccttctggtcctctttttgtatatctttttctgcccgttgttaacatcttagtggggattgtttgaagaatctttttttgcccctaataagcatcatcttttttttttttttttttttttgagacaggctttcgctctgtcgctgaggctggagtgcagcggcacacttgtagctcactgcagtcccaatctactgggcttaggtgatgctcctgcctcagcctcctgagtagctggggctacaggcacactcccccatgcccagcagatttttgtactttctgtagagatggggtttcatcatgttgcccaggctggtctccagcttctgagctcaagtgattctcccgcctcagcctccagagtgctgggattacaggcgtgaaccaccatgcccggtctcatccttgtcttaatgacaaacatcgttttaaaaaattagatgttttaaataatttcttcaagttactattaaaaagcatcactgggacagttgatgtaatttgttcatgactacaggaccccggatgcatgctaataacattcattcttgttttggaaaattgtgctctagttacataagagcatgtcctggattggaagagaatacctccagtttttcttgggtaaaggcatgtagaggctgtatgttaactttttttttttttttttttttttttgagatggagtcttgctctgtcatccagggtgcagtgcagtggcaggacctcagctctctgcaacctctgcttcctgggttcaacgagattctcctgtctcagcctcctgagtagctgggattacagggacctgtcaccacatcnnnnnnnnnnnnnnnnnnnnnnnnnnnnnnnnnnnnnnnnnnnnnnnnnnnnnnnnnnnnnnnnnnnnnnnnnnnnnnnnnnnnnnnnnnnnnnnnnnnnttttaccttttattataaaagtgtttagtctgctgggcacggtggctcatgcctgtaatgttagcactttcagaggccaaggtgggtggatcacctgaggtcaggagttcgagaccagcctggcctacatggtgaaaccctgtctccactaacaatacaaaaattagccgggcagcacacgcctgtaatcccagctacttgggagggtgaggcaggagaattgctagaatacaggaggcagaggttgcagtgcactgagatggcgccattacactccagcctggatggagtgacatagaaagattaatataataaaactcaataatctcatcacccagatttcatgcttactaatgctttgtcatgtcagcctttttattttttaattttttccttcagcctatttttttttttttctttttatagggtctgactctgttgcccaggctggagtgcagtgacacaatgacggctctttgcagcctccacctcctggccttgagcaatcctgccacctcagcctcccgagtagctgggactacaggtgcgagccatcatgactggctaatttttttatttttacttttcgtagagatagtctccctatgttgtccaggctggtcttgaactccagggctcacaaaatcctcccacctcggcctcccagagcgctaggatatagacatgagctaccgtgcctggcccatatcagccttttttaatttaaaattttaaaaagttggcggggcacggtggcttatgcctataattccaagacttcgggaggccaaggtgggagggttgcttgagcccgggggttcaagaccagcttgggcaacatagggagactcttgtctctacaaaaataaaaaataaaaaaaaaattagccagtcataatggcgttacacccaaagtcccagctactcgggaggttgagatgggagaaccactctagaccgggagctggaggctgcagggagctgcgatcgcaccactgtactccatcctgggtgacacagcgagaccctctctccaagtaaataaatgaatgaacgaataataaaaaataaaaaagagctatcctgatacttcgctcctaaatcatctttttttccctaagtcttttgtatgcaccactaaaaaaaaaaaaagccatttttcctgcatgacccaacagaatgagctgtaattagcttgtaatatatgcaaatgtccatctgcattctgacttcccaagctgcatggctgccttcatttgcagcgggcagctgtgctgcagaggggagcagcatcagcaggcgtgtggagtgagtgagccccgtcctccccctcctcctgtcattgactctcattgcctaacccccttgtgtcttggccccaggttgattgtccggggctaccgccagcccctggagggcagtgacctctggtccttaaacaaggaggacacgtcggaacaagtcgtgcctgttttggtaaagaactggaagaaggaatgcgccaagactaggaagtaagtgtgagtttccttgtcctccaggatgccctggtcacctcctttccactcctgtggcctcaatccaggatggggccctggcagtgctgcctgttactagctttgtggttctgggcaagatgcctcacttctcctcctggcctcagtttgcttttctgccaaatggggtaggatctcacatgtcattaaagcaactgggcagagaaaagaagaaagaagctgggtgcggtggctctcgtgtctaatcccagcactttgggaggccaaggcaggcggatcacttggtcgggagtttgagaccagcctggccaacatggtgaaaccctgtctctactaaaaatacaaaaattagctaggcatggtggcaggcgcctgtaatcatagctactcaggaggctgacaggagaatcacttgaacccaggaggcggaggttgcagtgagctgagattgtgccactgcatactagcctgggagacagagtgagactccgtctcaaaaaaaaaaaaagaagaaaaatgttgtccaaacaggcagttgatgctgtctgccatggcgcgtgactatccctccttgagtcagtctcacttttttctgtctctttctgagcatctggcatcctgcatgttcttgctgtttgaatgttctgtccaacatgcccagctgaccacgtaagtctgtttagccaaagaagccccatttgagggtgattttggctgtactggattttaggctctaccccctatgtaaggcgtgccccactgcaccacctctgtcactcttcgggaatcaggccagtgcctcccctgcacataccttaactcatcaaatctgagacaccattagttgcgtgatgcgttattattctatgtaacagtaagaaagaaaagcagctgccaattaaacaaggacataagacttgtctcgagcccggacgaactggaacatgaaattgtgggtgacatgggggcagtggattgcggccatgggggtagtagaatggctgtttttgttcctgttgcctgttctggggtaagtttactacgataaactgtggtggggccagtgtggtgcattggattccccacagacccattggccttacagggaaaaaccccagaccggggttctgttcctcattctattccggggatgcccaggatacaggccttcagtcagacccagatggtgggtgggaatctggacatccatgtgccagccactaggacatcagcagaggacctcgtgactccggtcggaggctgtttgggtggtccaggtgatgggagaaattgtctcgtgggaggcagatagagcttgggcctctgtgactgagcattgtaaggaaatggcccatgtccatgacccagttgaaggtttttggcaggcaaaggtggggtccctgtttattacagttcttcatggagacagaactagtaggatggatggatggatggatagatgatagatagatggatgatagattgatagatgataggtagatgatagacggatagttggtggatgtatacatggtaggtagatggatagatgatagatagatggatgattgatagatgatggatggatggatggatggaggatgagaggggatctactagggaaactggatcatgtgattatggaggctgagaagtcccaccctaggtcatctgcaacctggagaacccaggaagctggtagcatggctcaggcctagtccaaaagtctcagacccaggaagctgatggtggaattctcagtccatagtcaaaggcctgagaacctggagtcattgggtaagtcccagaggccagaaatcctggagttctgatgttcaagggtgggagaggatgacatcctggctgcagaagagagagtgcctgcatttgccattactctgactttttgttgtgtccggaccctctgctgattgggcggtgccacccacatggggcgaggatggatcttccttagtcagtccactcattcaaatgccagtctcgtctggaaacatcctcacagacacacccagaaataacactttaacagcaatctgggtatcccttaacccagtcaacttgacccctaacatcacccatctcatctggattccttcagcctcacctgcagcatcccccccgctaagcaggccacatttgtagtgtgggcttcagcattcctcatcatccacgcctctgctgatcacctggctcggcttcctctcatggaagacggatgcccacctttgtgtcccctggagcttgtcaggagagcaggttgctggagacaccatgggagaggccaatatcacagccttgggaggaggacagagtttgaatccagaagctcctccactggcctggctcttaatccactgagcagatgaaactgactgctgcttttgtgcttagcgacgtttagtccctgagggttcagagagtggaacaaaagagacacactctagttgggtgccatcgacattctatatgggagacaggacgttggttgtgaaacatgcattgacaagaagctttggagaatgatggtgttggggtgagataaaaatgaggaaatgagggtgagagtaaccgaggaagcttttgtgtgtgtgtgtgtgtgtgtgtgtatgtatgtgtgtgtgtgtgtgtgtgtgttttctttttttttttttttttttgagatggagtctcattctgttacccagggtggaatacagtagtgtgatctcggctcactgcaacctctgcctctcgggttcaagcaattcttctgccccggtctcccaaagtgctgggattacaggtgcatgccaccacgcctgactaattttttgtatttttagtagagacggggtttcaccatgttggccaggctggtcttaaacttctaatctcaagtgatcctcctgccttggcctcccaaagtgctgggattacaggcatgagctactgtgtccggctgagagaggtgttttagatacagtggtcaaaggttctacccagtgtggccatgacccttggtgagcatgtgcctgtccctccctaagtctatctctggctgttttcgagcctctggcatcctgagtgttactgctttttgaagtgtttttgttcaacatgcccagctgaccatgtatgattgttttgagaaggtcacatttgagcagagacttgcattggagggagtgagccttgtgtgtatctggggaaggaagggctttccaggtagagggagcagccagtgcaaaggctctgaggacactcgtggtgcatcagggggcttgtgtggcttgaggaaagtgagtgagggggagaaagggaggagatgaagcaggagaaggatttgcaggggtctcctctgagagttaaggtgggattccaggtgcagtgagaacacaggcgcaggttttctgcagggcagtggtgtgacgtgagttctgttgtttgtttgtttgtttgtatgtatgtatgtatgtatgtatgtatgtatgtatgtatgtattttagagacagggtcttgctctgttgctcaggctggatggcagtggcatgattacagctcattgcagcctggaaattccgggctcaagcagtcctcccacctcatcctcccagagtagctggattacaggtgcacaccagcatgcctggcttannnnnnnnnnnnnnnnnnnnnnnnnnnnnnnnnnnnnnnnnnnnnnnnnnnnnnnnnnnnnnnnnnnnnnnnnnnnnnnnnnnnnnnnnnnnnnnnnnnntttttgagatggaattttgctcttgttgcttaggctggagtgcagtggtgctgtcttggctcactgcaacctccaccccccgggttcaagcgattttcctgcctcagcctccggagtactgggattacaggaatgtaccaccatgcccggctaattgtgtatttttagtagagatggggtttctccatgttggtcagtctagtgtcaaactcctgacatcaggtgatctgcctgcctcggcctcccaaagtgctgggattacaggtgtgagccactgcgcctggcctttttaaatttattttattttattattattatactttaagttttagggtacatgtgcacaatgtgcaggttagttacatatgtatagagacaggtctcactgtgttgcccaggctggtctccaagtcttggcttcaagcagtcctcctgcctcagcctcccaaatagctgggattacaggtgtgagccaccacacccagctgagttctggttcataacaacccaggctgtcctggggaaggtggatatttagggacaagagtgaaggcagggagaccagggtgggaacctcaagggctgtccatgaagtcccttcatgcctcaccgggagccgccattgtatttatttatttattttttgagacagggtgtcactcttttgtccaggctggagtgcagtggcacgatctcggctcactgcaacctccatctcctaggctggagtgatcctcccacctcagcttccctagtagctgggactacaggcacgtgccaccacacctggctaattttttttttttttttttgtagagatgatatctcgccatgttgcccaggctgttctcaagctcctgagctcaagcagtccacctaccttggtctcccaaagtgctggtattacaggcgtgagccactgtgcctgactggagcctccatttttcacccagagcattttctgagaattcagtgagatatatgatatgataagctgtgccctagccctgagtacatgctgggcaggttttaattgtacaagttttatttattcatctgtacactttgatcttgccagggaggatgtggtgagaactgggtcttggggcttgaaagcgggccacctgagaagggtctggctctgtgagtaccttggtgtttagagatcctcagcgtggagccaggggatcatttacttgggacattggtagacggatcgcttgctttattcccagaggcataagccagatctggcacctgtaacccctgtgaacctggagagagtgagaaggaaaaccctgtcctaggctggaatttcctggtgtggccccttacactcagatcccttttgttaaccagagaaaggaatgcagctcgtgcagctctgggctgctgggtatcctaggctcggggatcaggtgatggacgccagggctgggggctctgcatggcttcctggatccttttaccacctctcttcacccatgagtgactccttctcaaaagtcaggtgtggctgggcatggtggctcatgcctgtaattgcagtacgttgggaggctgaggcgggaggctcacctgagttcatgagttcgagaccagcctggccaacatggtgaatccctgtctctgctaaaaatacaaaaattagccgggtgtggtggcgctcacctgtaatccagctacaggggggctgaagcatgagaattgcttgaattgtttggatttaaaaacccagtgcttcattggtttgtgtgtagtggttttatgttctcttttgtgtatggccactcagagcttagggccattttggactgtggtttctgctggcatgaatgtgaaatgcttctgtgactctggaagagtttggcagttttttttttttttttttttaagttagacacagtgaacataccaccagtcacccccttcccaggcatccagccaacagagctgagaacatatgttcataaaaggctggtacaggaatgttcttagctactttgtgataacccaaactggaggtaagccagacatctattagcaagtgaacagacagatgcaccagttatgtacatctgcacaactgaatactaagtgatgtacaagaacgaactattggccgggcacagtggctcatgcccataatctcagcactttgggggcccaaggcaggcagatcacttgaggtcaggagttcaagaccagcttggctaacatggtgaaaccctgtctctactaaaaacataaaaattagctgggtgtggtagcgcacacctgtaatcccagctactcgggaggctgaggcaggagaatcgcttgaacgcaggaggcggaggttgcagggagtcaggatcgcaccattgcactccagcctgtgtgatagagcaagactccatctcaaaaaaaaaaaaaaaaatccctataagataaagactacttttttggtgacagctttattgagatattcatacaccgcacaattcatgtatgcagaacatacaattcactgatttttagtgtgttcacagagttgtgcagtcatcatcacagtcaattttatttatttgctttttaagacagagtcttgctgtggcgctgaggctggagtgcagtggcacaacctcggctcattgcaaccccctcctcctcctgagttcaagcgattctcctttctcaccctcccaagtagctgggattacaggcaaccgccaccatgcctggctaattttttatatttttagtagagacaaggttttgccatgttggtcagggtgttctcaaactcctgacctcaatgtgatccacccgcctcgacctcccgaagtgctggcattacaggcatgaaccactgcacccagtcaaaaaaaaaatttttttttagaaatagggtcttgctgtgttgctctggctggctggactgtttttttttttttttttttttccactgatgtatatatgcctatccctttacctgtcttgatgattgttgttcttttttttgttttgtttttttctttttgagactgagtctttttgcccaggctggagtgcaatggtgtggtctcagctcaccacaacctccgcctcctgggtttaagcgattctcctgcctcagcctcccaagtagctgggattataggtatgtgccaccatgccgggctgattttgtatttttagtagagatgaggtttctccatgtttggtcaggctggtcttgaacctgccgacctcaggtgatctgcccacctcggcctcccatagtgctgggattacaggcgtgagccactgcgcccagcctattgttgttctttctttttgagatggagttttgctctgtcacccaggctggagtgcaatggcctgatctccactcacagcaacctccacctcccaggttcaagtaattctcctgcctcagcctcccaagtagctgggattacaggcacctgccatcatgcccggctaatttttgtatttttagtagagatggggtttcactatgttggtcaggctggtctcaaactcctgaccccaagtgatccagccaccttggcctcccaaagtgctgggattacaggtgtgaaccaccactcctggccatgattgttattttgtattgttttgaaatcaggaagtgtgaatcctccaacttgattcttatttttcatgattgttttgactgttctggatccttgagtttccatgtgaattttaaagttagctcataatttctacctggcagccagctgggcttttgatggggattgccttgactctagatcagtttggagccatcagttttctaagtctttaacttattcaactcgtttaatcttacctaccttggaggtaggtcctacttttatcctcatttcacagaggaggaaactgaggcccagagagcttaaggaccttgtctgaagtcacgcagctggccagtggccaagccagaccttgagccggtggctctggagcccgtggctctggagcccgtgtttgtaaccactgtgctgagctgcctctttccctgggcttgttgtctttgactctgccttccctgaagggtgacattccctggccatgtccctgtggtagggggctgcatctctggcagaccccacaacggcttcacctccttgtgttccaggcagccggtgaaggttgtgtactcctccaaggatcctgcccagccgaaagagagttccaaggtggatgcgaatgaggaggtggaggctttgatcgtcaagtccccacagaaggagtggaacccctctctgtttaaggtgttatacaagacctttgggccctacttcctcatgagcttcttcttcaaggccatccacgacctgatgatgttttccgggccgcagatcttaaagtaagaccccttccctcccaggtgggctccattttccctccttggctttgatctttcagttgcatcagtcataaccctggggtcatgctgtgtcctgaagtgggctcatagccagatgtctccatttttactttagcttttttgaaaaaaatagagacagggtcttgctttgttggtcaggctggtctcgagctcctgacttcaagcgatcctcctgcctcggcctcccaaagtgctgggattgcagatgtgagccatggtcactgcctagctttactttatgctttacttaattaccatattagtgaagaccacatcgtttgcaagtaacagaaacccactaggctcccctaaaacccaaatggggaggatatggcattgtcttgggaaaccaagagcaaggaaatgccagcagatctcatgaaaaaactgcaaccagggttgggcgcagtggctcatgcctataatcccagcactttgagaggctgaggtgggaagatcacctgaggtcaggaggtcaagaccagcctggccagcatggtaaaaccatctgctaaaaatacaaaaattagccgggcgtggtggtgcacgcctgtaatcccagctactcaggaggctgaggcataaaaattgcttgaacccaggaggcagaggttacagcaagctgattgcatcactgaactcaaaccttggcgacagagcaagactttgtctcaaaaaaaaaaaaaaaaaaaaaaagaataaaaacaacaacaaaaaactgcaaccaggaactggggagtcagaaaggaagttgcctctctcctacctggctctctgctgctctgtgactcaggggctacacatcccttctcttttcctccctacctctttacctcgtgttccctatgcaattcctttgggtgacttgctggtgatgagatatagctagagcaattagtgcacaaccccaaggcagaggcctcttttatgagcagtttgggtcacctgcacagccagatcaccactgtggacttgtttttccatctatgaaattgaagtgatagtgtctagctcatctggctcaggagaaagttgcagtgccaacactgaagctctcttccctgcccccacgtgtcacaagtcattccaggccctctctttgctcctttgcaggttgctcatcaagttcgtgaatgacacgaaggccccagactggcagggctacttctacaccgtgctgctgtttgtcactgcctgcctgcagaccctcgtgctgcaccagtacttccacatctgcttcgtcagtggcatgaggatcaagaccgctgtcattggggctgtctatcggaaggtaggggacgctgtgccattggcatgtggcccgacttccacatcccctcctgcagccctgggttactctggggccagcgtggggatttccagcccagcttctggagcagtaggatgagggtagcttccgtgaccttaggtggcagggacagcacgcatcaggcattgtacgttaggaaagctgatttcaagggtgggcgtgtagatgtctttgtgtatcagctgtgagtaattgagtttcttagatggatcagtggcccttgttgtggggaaatccaagtttggatcctcattctgctgttaacattctgtgtttcagcttgttgtcactctttttttttcgtttttttgagaccaggtctcactctctcccccagactggagtgcagtggcatgatattggctcactgcaacttctgcctcctgagttcaagcgattcttctgcctcagcctcctgagtagcggggactacaggcgcctgccaccacgaccggctaatttttgtatttttagtagagacagggtttcgccatgttggccaggctgatcttgaactgctgacctcaggtgatccgcctgcctcagcctcccaaagtgctgggattacaggcatgagccaccgcgcccagcctgttgtcactcttaatttgaactgagcaggtggcacattccttgcatggtaagagtatgtagcaggcatttgtgtacatccaatttcaaaggacctaaattaccttcttgatccctataaatttttttttttttttgtctcgaggtcaaggaaactgcttggctcctaggttaggaagagacagtcttgcaggtacttgatgaactagaggagtgattctcaggcctgtctgtgaattagactcacctggggagcttaaactgatgcaggccaggcactgtagctcatgcctgtaatcccagcagcttgggagaccaaggtgggggaatcactggaggcttggaagttcaataccagcctggtcaatatagcaagaccctggctctgcagaaaatttaaaaaaattagccaggtatggtggtgcgtacctgtagtcccgtctactcaggagattgagttaaaagaatcacttcagccccggagttggaggctgcagtgagtcctgatagcatccctgcattccggcctgtgtgacagaatgagaccctgtctgaaaaaacaaaaaaacttcctgacacctaggttgcaccagaccagtgaaattgcgattgctgtggtggcacccaggtgtcattgtttttgttttttatttatttttatgttttgagacagggtctcgctctgtcacccaggctagagtgcagtggcatgatcttggctcactgcagcctccacctcctgggctcaaacgatcctgccacctcagcccaccacgtagctgggcccagaggcatgcatcaccacgcctgctaatgtcttagtgtttttaaaactcacgaggtgatagtgtgcaatcatgtttgagggctagggacattttcccccaccagggcacgtttggcaatatctgggggcattttcggttgtcccaactgggggcgagggcatgtagtgggtcgaggccaggtattgctgctaaaactcctacagtgcgcaggacagccccccaaagaattatctggctccagatgtcaagaatgccaaggattagagaccctggcccacaccctcagtccttcagtgggatctgggaccagtagcactgacacagcctggaagcgtagaaatgcagaatcccaggccacaccccagacttgcagaatccaaaacaactccccccaccccccaccactccccccagaaaaacccggccgcatgtgtgcacattaaagcatgcgaagccctggtttcgaggacacctagggtcccttgccaactgatgagttcaaggttgggaggcactgagcaccgcggataagaatgtgggctttgagatgacacaggcgtcctgggcagacagataggtcgggaggggaggaggagagatctgcggcatttctgcccctgagagtctccttcctctccgtgggtctggagggagagtcaggcctcttcagctgccacactcacccaccttccctctcctttgtcccacaggccctggtgatcaccaattcagccagaaaatcctccacggtcggggagattgtcaacctcatgtctgtggacgctcagaggttcatggacttggccacgtacattaacatgatctggtcagcccccctgcaagtcatccttgctctctacctcctgtggctggtgtgtgtttaacgccgtttccctttgcatgcagggagggacttctacgtgtgggcagtgggccgagggagtgggtgttgatggtaatggcatgtagagctccctggcagttccggctgtggttcatattttattttccagcctgttaaccaattcctcagtattttgttcctttcctgaattgtcaggttgatgttctccttggtggcatggcgttttcattttctcttttccttgacagtgtcagtaattaactaccctacaatggacgacacatcatatttctccccttgaatcctcccaaacgctaaccagactcacttattcattagtccctaattatggtggtcaaaattctctcaattgcaagggatataaatctgtcttaaagtagcctaagtggccggttgcagaggctcacgcctgtaatcccagcactttgggaggccgaggcgggcagatcacctgagatcaggagttcgagaccagcctcaacgtggagaaaccccgtctctactaaaaatacaaaatgagctgggcgtggtggtgtatgcctgtaatgccagctacctgggaggctgagacaggagaattgcttgaacctggaaggcggaggttgcggtgagccgagattgggccattgcactccagcctgggcaacaagagtgaaactccaattccaaaaaaaaaaaaaagtagcctaagtaaatagagggaactttggggctgcatgtatctcagaaatctggggactagcttcaggtgtggattgatccaggagatcaagcaatgttgtcagtactcagtttcacccactgccctgttgtcctctgagttaacatcattctcagtggtacttccctacatggctccgtagctttgggctgataacatcctgatagataaaggtgccagagaaaagacaaggcagcatttctctgcacagccagagtcagtctcagagagcactctgattagcctggcttggtcctattcacacccgtgaaccaatcactgtggcccaggaggcagagttctctcattggccagcctgggtcacatgtcctctcccatggcagaagagatgtgattgacagcccttccatgtggagagggagagttcccaaaataaaatgataagcaaagaggctcatagcacaacacatgccttgtgctttgctacctctggatctttgccacgtacctttccttccttcttcctaattgatgaaagcctgctcatcccccaaggctgtaacaaacactacttccattgatttaccctcccttctcaattagatggacttcttcttttgaattttgagtcccaataactttagtataggaactcatctaataatactttctgaaatagttttttttgttttgtttttgttttgacatggagtcgcgctctgttgcccaggctggagtgtggtgtgccatcttggctcgctgcaacctctgcctcccagcttcaagcaattctcctacctcagtctcccgagtagctgggactacaggcttacaccaccacgcccattaaattttcttttttttttgtatttttagtagagacagtgtttgatcatgttggctaggctgatcttgaactcctggcctcaggtgatctaccctctgtggtctcccaaagtgttggaattacaggcgtgagccaccgtgcccagcccactccctgaaatagttttgttttgttttttttgcatgctcagtgtactgcctcctctttgaagggtaacatgttagctacttgcagacatatagcagctgacttttgtgtcttctgtgggtacaaccccagcagggcctgatgcataatgggcacagctcaaattattatctgttattgaaagagaagggctggacgaaatggctcatgcttgtgatctgaacactttgggaggccaaggcgggtggatcatctgaggccaggagagcagcctggccaacatggcaaaaccccgtctctactaaaaatataaacattagtcaggcatggtggtgtatgcctataatctcaactacttgggtggctgaggcaggagaatggcctgaatccgggaggcggaggttgtattgagctgagtttgtaccactgcataccagcttgggcaacagagcgagactctgtctcaaaaaaaagaaaaaggaagaagaaaaaattactggtttatttggctgtagtttggtttttttttgtacatttgtagagcagaaggtgagtaaagtgtttctaataataaaactcagaaaaaacaccagaatttaattgtctaataggctgggtacagatataggtggcatgcgcctgtaatccctgcactttgggaggctgaggtggaaggattgcttgaagccaggagtttgagaccagcctgggcaacatagtgagaccctgtctctacaaaaaaaaaaaaaaaaaaaaaaaattagctgggcatggtggtgcctacctgtggtcccagctaccgtggaggctgaggcaggaggattgcttgagcctaggagtgcagaggctgcagtaagctaggatcacaccactgcactcctacctgggtgacaaggcaagaccctgtctctagaagaaaaaaaaaatctaaataaagtgtcttttcaagcaggtgtcttggggagtccacttttgtaaaagtgctactatgggaaaaatatttttggaacatttgttctagaactgccttcaggattggtttatgaaccgttaagaaaattgtctaacatcacgttttgttttagatggtagttgcttgagcctcagcactgttgacacttggggccagacagttctttgttgtgggggctgtcttttttttttgttcttgttattgttttttttgtttttttaagggacagagtcttgctctgttgcccaggctggagtgcagtggtgcgatcatagctcactgcagccttgaattcttggcctcaagcagtcttcccactttgtcatctcatctagctggggactacaggtgcacgccaccatgcctggctaagttatttatttttttgtagaaatgggggtcttgctgtgttgcccaggctggtctcgaacttctaccctcagctatcttaccactttggcctcccaaagtgatgggattacaggtgtcagtcactgcacctggccacaaggctataagttaatacagcaaaattagcaaggaattaaggcacacatggggcggtgttcaagagaagccaggtgcaggcttccaggagtccccagcagagtcacaggttcactaattctctggcaaccatgatgattatgtgtgtgaaatgttgccaaccagggaagcttggtaggagctcagttcctgggtttgtattaggggcaggtcacataagcagcctttgcttggcacataccaaaagtctagactcccagagggaaagcggtgttcagcataaaccatattgtttgtacaaacagttgaggcacactgagctactctacccaattctgttaatggtggaaaccctgtaagtatgcagacactagccaagggctaaacttgtaagcagccttcaagcaggaaaagcaatcaggtggtcgtgttcacacttttctgcttactaccttattacctttctaaaaatctaagctgggtgtgatggctcgcgcctgtaatcccagctacttgggaggcagaggtgggaaagtcgcttgagcccatgagtttgagaccagcttaggcaacatagtgagaccttgtctctacaaaaaatcaaaaaaatagctgggcatggtggtgtgagtgtagtcacagctacttgggaggctgagttgggaggatcacttgagcccaggagatcgagagcagtttgagtaacatagtgagaccttgtccttacaaaaaaccaaaaaaattagctgggcatggtgatgtgactagtcacagctacttgggaggctgaattgggaggatcgctggagcccaggagttggagaccagcctgggcaatgtagcaagacctaatgcttacctgtagtcccagctactttggaggctgaagtaggaggatcactgatgcaaatagccactgtactgcagcctgggcaacatagcgagacctcatctcctaaaaaaaaaaaaattagaatcctgcagttgtaatttgcaaaactcatgtggccccaagggcttgggagaaaggagcgtggacctgcttattcttcaagggattgggaggacctggagagatgctcaggaatgaaaccacaggctcttaacaccctattgtggggtaaaagtaacacaccttgccctgaacttggtcagcagcatccacgtgggatggatcaaccggggaagctgttacgggccctgttttcttctgtctggtgagtgatgaagagtctcctttccttccttagaatctgggcccttccgtcctggctggagtggcggtgatggtcctcatggtgcccgtcaatgctgtgatggcgatgaagaccaagacgtatcaggtaaggcatgtgtctctgcgggcccccaagccgggccctaggcagaggcctctccatgaggattttagtccagttccttctgctctgtccctggggttctcagccttgcctgccagttggactcacttggggagccttaacaaatgctgatgccccggctgcatatctgggattctgattcacttattgtgggtggggtctggacatcaagatgttttaaagcttcccaggtcattatattgggcagccaagattgagagctcctgacacatggttagaccttgtaggccggtgactggaatcagaaggtctgtgagcctctgagaaagtccttgtttcccacggtcttgtttattatgtgtatgtgtgactcagctttcaagagttgagtacaaattaccccctacttttttcccccttattagctcttaccttataggatacatgctgttaatctctttatttaaattaaaataattaatttctaaaatggggccttgctgtgttgcccaggctggtctcaaactcctgggcttaagtgatcctgttgcctcagcctctcaaagtgttgggattacaggtgtgagccatcatgcccggctttcagctttttatttttggagatattttgtattttaaaaagtttgaatacccaagtaatagagtgatgtttcttattataaaaaagtccaaatcaagccgggctcacccctgtaatttcagcattttgggaggccaaggtgggtggatcgcctgagcttaggagttcaagaccagcctgggaaacatggtgaaacctgtctctaccaaaaatggaaaagttagctgcatgtggtgannnnnnnnnnnnnnnnnnnnnnnnnnnnnnnnnnnnnnnnnnnnnnnnnnnnnnnnnnnnnnnnnnnnnnnnnnnnnnnnnnnnnnnnnnnnnnnnnnnntcaaaaaaaaaaaaaaaaaaaaaaaaaaaaaaaaaaaaaaaagtttaaatcgtacaaaagtacataaattaaaaggggatacccccttcctactctctcaaccactgcaaatatatagaagcaaatccttctacaactttctacgtatgtatatacagacctgattaatggtatagtttggtttgttttatatatgtgggtttttttttttgtttgtggagatggagtctcactttgttgcccaggctagagtgcagtcgtacgatcttggctcactgcaacctctgcctcccgggttcaagtagttctcctgcctcagcctcccgagcagctgggattacaggtgcccaccaccacacccagctaatctttgtatttttagtagagatgaggctttaccacattggccaggctggtcttgaactcctgacctcagatgatccacccgcctcggcctcccaaattgctgggattacaggcatgagccaccatgcctggccattatatatgttttgtgtgtgtgatattattaccatatctgtttttacctaaatgggcccacgtggcagcatgatttttgtcctttagcgccctgctttggggacctctctgtgctgtgccgtatagcttcaattcattcttccaacccggtgccttttggtctataatggagatggtgcagtttatttctttgctcttctgttgatggatatttatggtgtgctgtggaatttcaaatgggagcactaggctgcactgacgataccacagggagatgagtttcaggacatgggcctgttggaaggagaggcctcacgtggtagggttgggtgggatgggtgaggcaggggctttaggattgagtcacccttcagtctcttgatgtgtaggatgccctgagtggcccgactcaacccatttcagtccctggcctccagatcatgtagcttatattcttcccatctgtgacccggggatgactgtagcactaaatgataagagttcttgtgattgttaagtgtctgaatacatgtaaaatgcttagaaaagttgctgggatacacaaaatcctgggtggtagtaaaagtatttaacaactgcactgcacaagtatccactatttggaaccagtgctagccagtacagaaacatttcactattttaacaaccatgggccaggcacaggggctcatgtctgtaatcccagctctttgggagcctgaggcaggaggttggcttgtggccaggagtgcaagaccagcctgagcaacatagcaaggtgccatctctacaagaaatacaaaaatgaactgggtgtggtggcatatgcctgtggtcccagatactaaggaggctgaggtgggaggatcgcttgagcccaggaattcaaggctgcagtgagctatgatcatgccactgcactccagcctggatgccagagtgagatgatgtttccaaaaaaaaagaaaactgggctgacaagaaataagaaaacaggctgggtgcggtggctcacacctgtaatcccagcactctggtaggccgaggttggatcacttgaagtcaggagttcgaaaccagcctggccaacatggtgaagccccgtctctactaaaaatagaaaaattagccaggcgtggtggcaggcgtttatagtcccagctactcaggaggctgaggtaggagaatctctttaacccgggaggcagaggttgcagtgagccaagatcgtgctactgcactccagcctgggcaagagagcgagactccgtcacaaaaaaaaaaagaaaaaatacgaaaacagagaagaaaaacaccaccaccatgtctcctgtgtttgggtcagcagagtagggactgaatcccttcttttctgtacacctgaagggtttttcttgcctctgttcctggattctaaattgagtatgtttctccaatgtctaacctaacgtgatttgaaggggttttttttttcttgatagcggggtcctttggtgtggtcttggggctcaagagtagggctagtagggattacagggtcagctctcccaccctcaggaggcccatttttaatagacggtgaagttgaggcccagtgcggtggctcacacctgtaatcccagcacaggagtttgagaccagcctgggcagcatggtgaaaccccatctctattgaaaagaaaaaaaaaaatcaatataaaaaacatttacatgtcaaagtatataataaagtttatgagaaaaatagctggtgatgttgagtgatgggctgatcccagggtcgccccagatgtgttgactgcccgtctcttccaaggtggcccacatgaagagcaaagacaatcggatcaagctgatgaacgaaattctcaatgggatcaaagtgctaaagctttatgcctgggagctggcattcaaggacaaggtgctggccatcaggcaggaggagctgaaggtgctgaagaagtctgcctacctgtcagccgtgggcaccttcacctgggtctgcacgccctttctggtgagtgaagccacatttttcctggccctcattgtttgatgttttattttctctgcgtacctgaatatttttaaaaggtcactatgttgcccaggtgcagtggctcatgcttggtaatcccagcactctgggaggccaaagcaggtggatcacctgaggtcaggagttcaagaccagcctggccaacatggtgaaacccagtctctactaaaaatacaaaaaaataagccgggtgtggtggcgcatgcctgtagtcccagctactagggaggctgaggcaagagaattacttcaacctgggaggcgacggttggagtgggccaagatcacgccagtgcactccagcctgggcgacagagcaagaccttgtctcaaaaacaaacaaaaaagtcactatgtcagcaaggccttccctgaacacttggtttaaacatttgccatcttctccattctcctttgttttattcacacttagcagcttctagccaacctgtgtaggaaccgttcgttatctatttactgtgatataaggagcttgtgccagaatgtaaaccagtgccccctgcttcctgcattaagatagccttgcaagacaaaaagtgcgagctgagtcgaacggcacgcttggtgccatagttgatctacattgtggtgctgcgtccttattttgtcaccaactggtcacaaagtgtggattgtcagtgtctcataggccacatgtcaagtggcatggtctaaacacactctaaaatttacttattttgggctgggtgcggtggcttgtgcctgtaatcccagccctttgggagtccaaggtgggtagatcacttgaggccaggagctcgagaccagcctggccaacctggtgaaaccctgttactgcttaaaaaaaaaaaaaaaaaagaaagaaaaaaaaagctgggcatggtggtgcatgcctatattcccagctactcaggaggccgagacatgagaatcccttgaacctgggaggctgaggttgcagtgagccgagatcgagccacggcactccagcctgggcaacacagcaagaccctgtctcaaaaaagtaaaaaaaaaaaaaaataagtaaaataaaatgtacttattttattgtctgcttttcccccactaggatgtcagctccagatgggcatttttgtcgtttctcttgactgctgtatcctcagtatataaaacagtgcatagcaggtgctgaacaaatattgtcatccattgtaaaaaaaaaaaaatacagaaagatataaaatgaaaagtatattgtcctctcttccatcagttcctcccttctaaagtgacagtttcgtgtacgcttttagagaaaaatggacaagcatataggtatttaaaaatactttgacagatataaatggaatcatactgtacatagtgttctcttttctttggttaacaatatatagtcttggttcgttcattctggtctacttcattttagttttttggggggttttgttttgaaatggggtctcgctctgtcccccaggctggagtactgtggtgcgatcatagctcactgcagccttgaactcctgggcccaagcaatcctcctgctttagtttcctaagtagctgggactccaggtgcactgctaccactcccagcttgtttcatttgtgttcatgatggatgcttgtctgacgtgcagatgcgccctgctggaattaccctttctcccattccttgcaaaaacaggttgttccctgttttttttgctgttatgatccatgctacactgaaagttctggtacctgtcctggggtatggtaatgggtctatccctgcctagctggctttgaaaagtttaaagacaacagtgcaacttacaatttgcaaagttggccgcaaatcaggagaccatacagagatggactttggaaattccctttttaagcacagttaaaaacagttaatggtgaaggatgacttcagatcatgccccatgtttgttttttctttctgtctttttattaactgtgtcattctttttgtaatgttgtgctcattacaactattccttcttggtcaggttggcaaattatatgtttttctggcaagtttctgtgaagcagagttaaacatgtttatgaatatgaacttttctgttaaactaccatctgcttcatctttgttgagtttcaggtggaatgtctaaggaagctccagctgtttcagcatttgcgaaagcgtgttcatgctcccactgaattttcttagtcttgccttacttctctcagggtctggaactgcaggagagatggtgttcaaattcaagcctgcatcagaatcacctggagagcttgttattatattttattatttattcatttattgagatgaagtcccagtctgtcacccaggttggattgctatggcactatcttggctcactgcaatctctgcctcccgggttcaagcgattcttccacctcagcctctgagtagctgggattacaggcatgcagcaaccatgctcagctaatttttaaaatatctttagtgtagagatggtgtttcaccatgttggccaggctggtctcgaactcctgacctcaggagatctacccgccttggcctccgaaagtgctgggattacaggcatgagccacagtgctggctgttagcttgttactataaaactcagctttctgggccccacccaaattttcagttttagtaggtctggttggggcctgagtatttgctttcctaacatatccctaggtgctgctgcttctggttcaggttgacatgtagagacaccggagtggatcctcactgcctaaagtctggtccgtggaccagcagccatggcatcacctggtgcttgttaacggtgcagaatttcaggcctcagcccagatccactgaaacggaatctgagttgtaactagttctctaggtggtgtgtatgcacattaaatttcgagagagactggcagaaagtaggagtaaagaaactttttctgtaaatactttcggaattccgggccatacagtctctgtcacaaataccagtctcttccagcgtagtgcaaaaacagccttagataatatggaaatcgatgggtgtggctgtgttcctgtaaaaaagtatttagagacaccaaaatttgaattttatagaatttgcatgtgtcatgtaatattgttttgatttttttaacttttaaaaaatatgaaatctggctgggcgcaggggctcatgcctgtaatctcagcactttgggaggccgaggcgggcgggttgcttgaggctagcagattgagaccagcctagccaacgtggtgaaaccccgtctatactaaaaatacaaaaattagctggaagtggtggtgcgcacctgtggtcatagctactcgggaggctgaggcaggaggatcgcttcaacccaggaggcagaagttgcagtgagccaagatcatgccacacactcctggctgggcaacagagtgagaccctttcctgctgctgcccccccaccccctcccagccccccacaaaaaaaaattagccaggtgtggtggagcatgctggtcatccaagctttttgggaggctgaggtacgggaatcgtttgaacccgggaggcggagatcgcagcgagctgaggtcacgccactgcactctaagcctgggcaacagaacaagactctgtctcaaaaaaaataaaaaaaatgaaatcaatgctgagctcatgggccgtatgtaaacaggtgtgggccaaatgtggacctgagccatccttgttggccagcccctggcttagaggactggaatgttcttctgagaatcaggacacctgccacattctactgccagctcacagtgtgaccccaaagctggtcatctcacctcgctggctctagattttgtcacatggaaaatgaaggggttagattccaagcatgtcaaatactgggccctgtcctccttcctcatgcccacagcagacacccacagtcactcatggggttctttcccactgagttatgttcaagcagccctccaggtgactggtgccagtggcctagagttgagcaagaaatgacatcttgttgcccttctgtaactccatgttccctaagatcacttccagctccaatgcccctgcattctgccttgtacattgcattcttcttacactccaataccttgactttaccggggtgcgttgatgaactctctctttttttgttttttttgggactgagtctcactctgtcacccaggctgaagtgcagtggtgccatctcagctcactgcaacctccatctcccagttcaagcaattctcctgcctcagtcccccgactagctgggattacaaacatgcactaccatgccttgttaattttaatatttttagtagagatgggtttttgtcatgttcgccaggctggtctcgaactcctgacctcaagtgatctacctgccttgatctcccaacgtgctgggattacaagcgtgagccaccgcgcctggactctcctttttttttgagaaggagtcttgctctctcgccaggctggagtgcattggcacgatctcagctcactgcaatctctgcctcttgggttcaagcgattctcctgcctcagcctcctgagtagctgggattacaggcgcctactaccatgcccagctaagttttgtatttttagtagagacggggtttcaccagggttcaagcaattctcctgcctcagcgtccgagtagctgggagtacaggcgcacgccaccatgccaagccaattttttgtatttttagtagagatggggtttagccgtgttggccaggctggtctcaaactcctggcctctagtggtccacccacctcggcctcctaaagtgctgggattacaggtgtgagccgccatgcccggtgggtcttactttataaagtaggaagtaatgtatttgcatatggtgaaacataattaaagctgcaccagatggtattcatacagccggacttcgcacgtggccacctcagcctgctgacattcgccaacaggtcatcctttgtccctgtgttgtagggcctggactgcacattgcaggatgtttcccagcatctgtggcctctacctgccagatgctaagtcgtacctctccctcttcttcccagtggtgacaatagaaaatggctccaggcattgcgaagtgtccccttgggggacagaattctcccagttgagaaccacagtcaatagtgaaaggcccaagcccttcctcctaacaccagtcaccttgcttccctctctccatgtttcttgtgtgtttttccagagtccacgtctgtatcactgtaatggtggatacatgtcatacatgtagttatggttacttgattctgtttactttacttttatacaagtgatagtaagagtcatacataaatacatacaaaatggctttttttttctttttttctttttttttttttttttttgagatggggtctcacactgccgcccaagctggagtgcagtgacatgatcttggctcactgcaacctctgcctcccaggctcaagtaatcctccaacctcagcctcccaggcagctgggactacaagcatgcaccaccatgcccagctaatttctgtaattttgcagagacagggtctcactttgttgcccaggatgttttcaaactcctgagctcgagcagtccgcctgcctctgtctcccaaagtgctgggattgtaggtatgagccactgcacctggccttgatggcattttgaaaggtcttgtctcagaggaaaagatacaagccagagggcgctggtgatgaggtttggtctgtgccttgtgtcccgcttaggaggggatgggcagcgtgttctcacagctttttgctctgcacattggattcgttggcaaaacccacagtttccaggctgtcaccaaactttgcttatcacttcctgccctgttccccattaggaaaccacagcagaagatgcttaagagcaggactggcttttcttctcttttttctttctttctttcttttttaaagagacagggtcttgttttgctgtccaggctggagtacagtggcttgatcacagctcactgcaacctccaactcctgagctaaagcgatcctcctgcttcagcctctggagtagctgggattacagatgtgaaatactgagcccggctaccggctttacttaaccttttcttgagctttcttgccatttagtttcccggagtttccagagacagagtttgttgagctgtttggcaagaaacagatgggcctgggtgtcagctggggagaccttgtcctggccgaggcatcgaagcctctgactacattaggataaaatatgtggcctttagttcccctggaaggtgcctgagtgttttttccactggtgtgcattcctgtgcttcaaagacgatgaggtgtttacccagcggtaggtgtgatggaacacagaggccggggaaggccagggatgccatccagggactgatgggactgtttttctggaatggcaaacctggcatttaccacgtccacctaatgcactttcctaaaatagcatcgccaggcagccgtcaatatttaacattttctgtcttggatgatttgtgagcttcttgccttctgtttaccctgaatctccctttgttagaataattcatcattctctatggtaatgatctgtcctgtagttctctgctgatcatatcctagggcccatggagacactgccacgaccatgtcattttatttatttatatatttatacatttctgtatttttgagacggagtctcattctgccgcccaggctggagtgcagtggcacaatcacagctcactgcaacctccacctcccaggttcagctgattctcctgcctcagcctcccgaagagctgggattacaggtgtgcgccaccacacctggctaattttttgtctttttagtagagatggggtttcaccatgttggccaggctggtctcaaactcctgacctcaagtgatccgcccacctcggcctcccaaagtgctgggattgcaggtgtgagctaccatgcccagtcagaccttgtcattttgtgcttgtaccagcaaagcatagggaccttggcaaatagttcatgctctgtaaatgtatgtaggtaaatgaataaatacatgaatgaatgagaggttgaaataaatcatattaattaggaactgtcttgcaaataacagaaacctagcttaaatcaactagagtaagagaagagggggatttttgagtcacaaaactaaaaagtctagaaaaagacttttaagcatgaatggggttccaggcatggctggatctaggagttcccaagataatgttgggaataacaacgtctctgactctcagctctgctttcttgatggtggtttctttattagctggtagtttcctgatcatcctgtcacctcagcaacccctgtgaacagagagtcttactcttttcccctaatatttcctgcaaagctatgggattgagtctcattggttgtggtcgatcacatgcttcttcctgagccagtcactgaggccagggagataggatgcttgggtcagccagggctaggtcatgtctttcagggcttggggccaaggtagggggtgagggaggaggttcatctgtggctgaagctcataggttgacactgggagaagttcagttcccccagagaaaattgcatgttgccataaacagagtaatagatgccaggtaggcaggaagagcaggtaactgcacacagggcatcaggatttttagggagtgggctggagtgtaggggttccattcattggttttccacgtttctcagaaaaggcacctaggggacaggtgctcctcactgtgtatgaagggcttttgcaccctagaccctcgcctattacaaggcgaactccagtctcctgctgcctggagccccagtcattgtgcccgtcctaccagcctcttcggatttccaaacactgcctgcagggaacctgttaaagcctgtgcttccactagactgtgcgtctcagggttgccaagcccacctcagtccccagcgcatgatgggtgctcagttaccacctgaggggtggatggctagatgacctcctccttctggagaagccaggaccatggacctgaaaggggccgcatgatgttgtcctgtcccctctctgtgtgtgccctgtgctgccagcagccggcatcgattggtacttggctcaccaagggggctggtacgttttggtggtgagatgcctgaggcctggtttgcttcactgctgaagagacacctgtgatgtgctcttctgccctcaggcaaattcacctaccccgtccccacccatttatccactcccacccatccattatctatccagcagacattcactgagcaccatgatctgggctctgtcctaggctctgacaatacagcagtgcatactacaggtaataatctccagtcatggaacattcatttttcacggagagaaacagacaaggaaaaataggcacaataaataaatcctagtgctagagaaagccatcctaagtgctatagaaagaaaagagtcagatctttggaataagggcggcttgcagttttaagtagggtggtccaagctcactgagaaggtgacacttgaggaaagacttgatggaggtaaagaggccaaccagggagtagcaagagcatgtgcaaaggccctggggcattactgtgcccattcataggtgggataaccatggaggctgaaacagtgggagtgaggggagagtgacagatgacgccaaatgaggtacagggaagggactttacaaatcagctgggccttgggatctgagtcagcactttgacttctacactgaaaaataggttgactttggagaggtacttttttaaaaattacttgtttagagatgggggcctcactctgttacccaggctggtgcgggggcacagtaatagctcactgcagcctcgacctcctgggctcaaatgattctcctgcctcagcctccctagtagctaggactacaggtgcatgccactatgcttgacttatttattaatattattgttgttttgagacggagtcttgctctgttgcacacgctggggtgcagtggtgcaatcttggctcactgcaacctccacctcccgggttaaagtgattctcctacttcagcctccctagtagctgggactacaggcacatgccaccacacccggctaatttttgtatttttagtagagacagggttttgccctgtcagacaggctggtcttgaactcctgacttcaggagatccacctgccttggcctcccaacatgctgggattacaggcatgagccattgagcccagccacctggcttattttttaaaaaattttgtagagacacagccttgcttttttgccctggctctgctcgaacttctggcctcaagtgatcctccctcctcggccttgcaaagcatttggattacaggcatgggctaccatgccgatcgaaatgtatttttttaacggaggtataattcaccatttaaaagtgtgcaattcagtggtttttttgtgtgatgtgtggtggtgtgaaggtcacccagtgggttttttgtataaatgataatgacaatcaccactaattccaggacgttttcattaccccaaaaggaagccctgtacctgttaccagttgctccccaaatcttccattccattccaggcaaccagtaatctgctttctgtctgtctctgtttatctactgtggacttttcatataaatggaatcaaacaacaggtggccttttctgactgttttctttttttttgagacgaagtgtctcccttgttgcccacctgaagcgcaatggcatgaccttgcctcactacaacgtttgcctcctaggttcaagcgattctcctgcctcagcctactgagtagctgggattataggcatgcaccaccactcctggctaattgtgtatttttagtagagacggagtttctccatgttggtcaggctggtctggaactcccgacctcaagtgatccgcccgcctcagcctcccgaagtgctgggatttcaggtgtgagccaccccgcctggccatctgactggtttcttagcatgatgttttcaaggtttatccatgttttagcatgtataagaatttcactcctttttatggttgagaagtctatcatgtagatacatgtagaccctttcgagtaaagaatatctctgggctgggcatggtggctcatacctgtaatcccagcattttgggaggccgaggcagacggatcacttgaggccaggagctcaagaccagcctgaccaacatggcgaaaccccatctctactaagaaaaatacaaaaagattagctgggcatggtggtgggcgcctataatcccagctacttggagactgaggcatgagaatcgtttgaccttgggaggcagaggttgcggtgaactgcgatcgcaccactgcactccatcttgtgcaaaagaatgagactgtgtctcaaaaaaaaaaaaagtatctttaggtaagatgccagtgttgcgttaccgcttagaagatgggagccaggatgggtgcagtggctcatgtctgtaatcccagcactttaggtggccgaggcaggcagatggcctgagcccaggtgttcgagaacagcctaggaagcatagggagaccctgtctctacaaaaataaaaaaactagccgggcatggtggtatgcgcctgtagtcctagctactcgggaggctgaggtgggaggaatgcttgagcccgggaggtcgaggctgtggtgagccatgattgcaccactgcacccagggatcatgcgtccctgtcgtttcgagcaccttgcctccctcttgacatcggagcctggaaaatttctgtgccatggctcagcgtcatctgtcttgttaatgtcagagccagaacacgaaccagctctggcttcccgtgggaccgggctctgcgcttgtgtgaccacgttaatagattccttggaagaatgatctaaggaatttggaccaaatcttccaacaagaaataaaaacagctgccatctgttgagttttactgtgcttgggccctgtgcaaataaacaccctacataagtgccaacagcccttaaaagcctatcatgacttccattttatagatgagaaaataggggcttgcctggagaggtgaaataactcaaccagggtcccacagcggaaatatggcaaagtgtatggtttttatttttaagctgtatgaccttccaggaagtaacaatgaaatggcagtgctgagaccctgaaaatacatgggccgatggccagatggcagggctatttgggtaaagtgggagagacagctcccttgaatggtgagagggaggagtcaggtggccccctggatggaagatggtttcaggcagaggaaacgtcaggggcaaaggcctggcttggggattgtgcttggtgcttttgaggaatactaagaatgcccctctaggacatctctgagaaagttgatgggagaggccggctctttgggctcccggtcgttgatttatccagttcattcccagagtgtttagtgagcacctgccatgtgccagatactgccccaggtttttccacgagctccagcagctggtcagttgtggccacctggggagggcccaagcgcgtctccagggcctgtcactgctcctaggatgatgactctcactcggggcacagcagtcagcactgggcgttctgcttgcaggtggccttgtgcacatttgccgtctacgtgaccattgacgagaacaacatcctggatgcccagacagccttcgtgtctttggccttgttcaacatcctccggtttcccctgaacattctccccatggtcatcagcagcatcgtgcaggtacagggggaagctggggcgacttccgagagggggccttggggttctaggccacgaaagcatggaagtgcccccgagcgcagcctctagatcacactcccggtcgggctccatgaggcccggacaaaggctgccatgctttcgtctggtcatgcctgaaagaaagaaaacacatttgacttcttgacagagaactcgcacttgagtatatgaatcaagtttaatgcagcagggctttcccatgctctggaagaatctttccgaaatactctgttctcttcagcctgttcctccgccattcctatcctttttttaaaaaaacgtagctcttgtctgacttgattgattttacaacccactgataggtcttgaccacccacgctttgagaaaccccaaccttacagccgggcgcggcggctcatgcctgtattcccaccattttgggaggctgaggcgggtagatcacctgaggtcaagagttcgagaccagcctggccaacatagtgcaacctcatctctactaaaaatacaaaaattagccaggtgtggtggcgggtccctgtaatcccagctactcggaaggctgaggcaggagaattgcttgagcccaggaggaagaggttgcagtgagccaagatcgtgccattgcattccagtctgggtgacacagcaaaaactccgtctcaaaattaaaaaaaaaaaaaagaaaaaccccaaccttacggccgggcatgatggtacatgcctgtaatcccagcactttgggaggccaaggcaggtggatctcttaagcccaggagtttgagactagcctgggcaatatggtaaaaccctgtatgtaaaaaaaaataaaataaaataaaataataaataaataaataaataaataaataaataaataaataaataaatatgtttgaaaattagccaggcatggtggtgtgcccctgtactcccagcgactcagaaggctggggtgggaggatcagctgagcttgggaagttgaggctgcagtgagtcatagtctcaccactacactccagcctgggtgaagggagtaagaccctgtttttttttgttttttgtttttattttttagaaacaatgtagaccatgtagaatctctaaaattcctgccattgactgtgtaaggaggggtggctttctgttttgtcacacttgggcactactggaagctcctgtcacttttctgcactgttttcacattctttttccgagcattgcgaacatcccttttgaaaactccattttaactacataggcaaatcaaccgtaaaatttggtagtacaaggctgatagcaggctttgtcaaaaacaaaaaaatccattttattatgaaaaatgtcaagtgtacacagaagtagaatagcttaaagtttgtaaactggcattaaaagaaaaagaaaaagaaaaaaaaagccaagcatgatggctcacacctgcaatcccagcattttgggagaccaaggcagacagatcagctgaggtcaggagttcgagaccagcctggccaacatggggaaaccttgtctctactaaaaatacaaaaattagccagatgtattggttggtgcctgtaatcccagctaatctggaggctgagacacgagaatcgcttgaacctgggaggtggaggttgccgaggttgcagtgagccgagattgtgccactgcactccagcctgggcgactgagtgagactcagtctccaagaaaggaaataatacaacatgaaccccgtgtacacatcactcagattcaacatcggcattttttggctgggcgcagtggctcacgcctgtaatcccagcactgtgggaggctgaggtggtaggattgcttcagcccaggagttcaaaatcagcctgggcaatgagacccttaatctacaaaaaataacaaaatgggtgtggggtgcatgcctgcagtgactacatgggaggctgaggcagaaggatcgcttgagcctaggagtttgaggctgcagtgagttatgtttgcaccactgcactccagcctgggcaacagagcaagactctgtctcaaataaagaaaccaaggttgggcgcagtggctcatgcctgtaatcccagcactctgggaggccgaggtgggcggatcatgaggtcaggagatggagaccatcctggctaacacggtgaaaccctgtctctgctaaaaatataaaaaaattagccaggtgtggtggcaggtgcctgtagtcccagctactcggttggctgaggcaggagaatgttgtgaacccgggaggtggagcttgcagtgagccgagattgcgccactgcactccagcctgggtgacagagcgagactccatctcaaaaacgaacaaaaaaacccaaaacattttgccacagttgatttatctcattctttttcagtatccctcccttgtccctctttcccttcatttgtttttaatgctaaactctgctatctatcccttcattctttcctttctttgccgaataattttaaagcaaatctcagaccccttacattctacccacaaatatttcagcatgcatttcttcctacataatgtaataccatcatcatgtctaagcaaactaacaataagtttttacaataatactcagcccatatccaagttttctggaatatctcagaaatgcctgtcccattgggctgtttgaattggctctgttgcatttgctgttacgtttccagagtcccttttccaccaggcctctgcccttttcttcttttatttttatttttatttatttattttttgaaatggagcctcactctgtcacccaggctggagtgcagtggcatgatcttggctcactgcgacctctgccttcccaggttcaagtgattcttctgcctcagcctcccgagtagctgggattgcaggtgcgtgccaccatgccaggctaattttatgtatttttttttttttttttagctgaggcggggtttcaccatgttggccaggctggtctcaaactcctgacctcaagtgatctgcctgccttggcctcccaaagtgctgggattacaggtttgagctaccgtgcccagccattcgcccattttttctgaaataccttttgtgggcttttaaaacaaagcagaaccaaacctgtttctttttttgttttgtttaattctaaagtatacactggttctaagaaatgtgggaccttcagaaataagggagggtgtgtgcccctccacacctggggaaacccttgaaagttaaccttggttggttttgcaaaaatgctttttaaaaataactctcccctgccattgctctctgtacaggcgagtgtctccctcaaacgcctgaggatctttctctcccatgaggagctggaacctgacagcatcgagcgacggcctgtcaaagacggtgtgtgtgtgttcagtcctggcttctggaagtggccgccttcccatctcccactgggtcctccctacttgcatttctttcccttggctgccctcaggtttgactctgcccagccgcttgtctgcgagaccccgggggacaagggttctgcagagcctgcagaagggaagggaagcctggcctcctgggcttctgtcctgtctcacacttcccaggagggtgaacttgcacttgcatttttgttttcttgctgagggtcagcagctgcttgaggcttccccgtgggagtcactttccaaggctttgaccttgattctattctgggctaaatgaggactctggaggctggccagcctccatcacccacaagctgtgtagacttaggtctgagcctcagtttatctagataagggaaacaaaagtacctttctttggctgagtgttacttggatttttttttttttttgagacagggtctcattccatttcccaggctggagtgcagtggtgcagtcacagctgtcactgcagccttgatttcgtgggctcaggtgatcctctgaccttagcctcccaagtagctagaactacaggcacacacagcaccatacttggataatattttggtatgttttgtagagacagggtttcaccatgttgtccaggccggtctcgaactccttagctcaagcaatccacctgcctcagcctcccaaagtgctgggcttataggcatgagccagttctcctggcctttttttttttttcaatattaaattgttttatttggagagacaaggtcttgctttgttcctcaagttggtcttgagctcctgggctcaaggatccctctgcctcagcctcccaaagtgctgggatgacagatgtgagccactgcacctggccatgcatttttattggcaggtttgtttgttttgtagcttgttaatttatcgtttcccagcccatccccctgagccagggatgttgtttgtaaccatctctctaggcacttaataataaatattaggccgggcacagtggctcacgcctgtaatcccagcactttggggagctgaggcaggtggatcacttgaggtcaggagttcgagatcagcctggccaacaaggtgaaaccccgtctctactgaaaatacaaaaattagctggacatggtgttgggcacctgtaatcccaactactcgggaggctgaggcaggagaatcacttgaacccaggaggcggaggttgcagtgagccaagatcgcgccactgcactccagccagggcaaagagtgagacttcatctcaaaaaaaaaaaaaaaaataataataataaatattaatggcactaagtgcagtgacacgttcacttataaagcctctgtcatgcacatgccattccaaggatgtcaatgtcccaacttgtccattactcaccatggtacccctggaggagggtgatggaaacccccattttccagatgaagaaactggtctctgaaacttgcctgagattgcacagctgatcaaaagaagaaccagcattcacacccacagcccatcggtagagtccatgctcttcctggccatagggtgttgcctcactgagatttactgagcacctactatgtgccaagcattgtgagaagtgctctgtgtgcactgcctcatagacaccccatcacagccctctgaagttgattgcatgattgtcagccttattttacagatgaaaaagtgaggcacaggctgggtgcagtggctcctacctataatcctagtactttgggaggccaaggctggaggattgcttgaggccaggagtttgagaccaccttgggtaatgtagtgagacctcgtctctacaaaaattaaattcaccaggcatggtggtgcacctgtagtcctagttacttgagaggctgaggcaggaggattggctgagcccgggagttcaaggctatagtgagctatgatcatgccactgtactccagcctgggtgtcagagtgagaccctgtctcaaaaaacaaacaaacaaaggcacagagaagttaactaacttgcctgtggctacccaggtacgaagtggtagccccaggattcaaacccatacagtctggctccagagtccaatgtcagaagattgaatgtgtgtaaacgtcggttataccgcgtgagctgtgtctggcacctcgcaggcgctcaggtatctttagtggcacctaaaacgtttgacacgtttgacacagcacctggtgcatagaagatgataaacagatcctgggagttgtcacttctctggtctgagcgagatggtctcagcatcttcagctcagccccctggtgtggggttttttatcctgggcgctactgacatctggagacacattgttctttgtggttggggactgtcctgtgcactgtgggatgttgagcagcaaccctggactctacccattagatacagtagtatccatcccaattttggcaaccaaaaatggctccagacattgccagatgtgccttgagggacacagttacctccagttgagaaccgtggcccaagtggatgctggactcttcctcccaacactcctgggctgtggtcatctggtttctgctgtcccagtgtcccacatcccctcacatcataaggcaatgattccatctactctggggtcaaatttctctgctaaccacaggctgaaatttgaggtggccggcggtgggtggggggtggtttcttggtactgaagttgttcacagctcaatgcaagcatcaggaaacccctaggcccctgggtgccgcccgcaccccagcccctccttcctgccctaatagtggcctcctaggtggttggacttcctggaatgtttagcacgctctagccagtgggggcccccttggctgctcccagctcccaagctaaccgttctctgcaacctctctgtctccagtggcttttcttaaattccttaaatagcaactcccagtttcctcattccacgtccactcgtagaagagctgagggagaaagttaatctaggttaaccagcaccttcctctctctctaggttttttgtttttttgatgcatggaggaagttatttcttcatttgacaacttaaacaaaaaatactcctgtattatctccagatggtcttaaggtggctcataattcagagagctgcttttctgttttttctttttctttttttttttttttttgagacagagtttcactctgttgcccaggctggagtgcaatggcacgatcttggctctctgcgacctctgccttggtttcaagcgattctcatgtctcagactcccgagtagctgggactacaggcatgcgctaccacacctggctaatgtttgtatttttagtagagatggggtttcaccacgttggccaggctggtctcgaactcctgacatcaggtgatctgcccgcctcggtctcccgaagtgttgggattacaggcatgagcccctgcgactggcctgcttttgttttaagtgagagacatgaagtaaaaggaaaataacaggaagaagagtaaaagaagacagaggtgctaggagctttagaagtgtggagctggccgggcatggtgtctcatgcctgtaatcccggcactttggaaggccgaggcaagcagatcacttgaggccaagagttcgagaccaggctgagcaacatgtcaagaccccacctctacaaaaaatacaaaaaaaaaattagctgggtgtgatggtgcacatcctgtagtcccagttgctcaggaggctgaagtgggagaatcgcctgcgcctgggagatggaggttgcagtaggccgagatcgcaccactgcgctccagcctgggtgcagaagccagatcctgtctcaggagaagacagaaacatggaaccagttaacgtgggctttgtctccgacactctccccttccctgtgccctcgtaccacacttcctgttccgtatcctctttttttgagtttatcgtgatggatgttttagaaagatccacctgctgtgatgtgctgtgtgtagagtggtgtggctgggggaggaagacagaggacctggggagaagggtgaacgacctccctttgcacctcaaggagggcccagcggtctgatgctggccaccccagtggagagaggtttgcatgtggacgccagctgtttcccactgaccttggccactgctcggccctcccagctggagctgccccgaacctgcctgagaagggccagggcatcgagagcattgagtaattctcatgcggcccccgcctctgcagtcatctcccaagatgatcgtccagatggcgcaaccccatcttacaaggacaaagctgcttgcagtttccttctgctttctgggtctggggctgcctccagaactgcaggttgagtttcttctttcagaacccgtggctgatgtcaccagataataatgcctagcgccattcgtgccaagcgtctggggttgaaccattcaagcagagaaagagagtgttctgtgcatgtggagtcgcacagctcagcctgtccctgacatgtctctgtgctttgtaggcgggggcacgaacagcatcaccgtgaggaatgccacattcacctgggccaggagcgaccctcccacactgaatgggtaagccgggacgtggacacacgtgatggtgtggagagagccacagggcttttgttaaacgtggattcgaattcccaccgtgctccctctctgtgaccttgaacaactcactttgcctttctaagacttagcttacccatctggacaatgggtgcagatacacctgcttaggctgtcgtgagaagcagacacacatgcctagcacagagggttccctgggattgtaagttacagcagccttggacagctagacttagacaatacaggagattcttggcttgcgtaactgggaagttctactttcaggtgcggtgtgatccagggactctgccgtcagaactttcttcatattttctgtgtttcactttctcctggtctgctttatcctcacgcatcctctccccttgtgatggtaaatggtcccaacagctcccactgtgtatcccactgttaggagaactgcctgcttcttattgacccagattgggtcctgtgccctctgtgaggcaatcgctatgccttcagacactgagtgtgctgattggccagtctcagtcaggggctgtgatgctgctgaactccagtgcccctcagctgcccagctcaccctttcttgccagctttctatctggcaccccacaccctacagtccttacctttccaaagcacatgatgtctaggaaattgaccttatccccaggcaacttgtcaagcacctctcattttgttctgaccagaggccttgatcaacagctttttaggcccccttaaggaatccgcaaaacacaggggtgatgggacccttttagaggtttagctcatgcctgggtagccaaatcactgctgtattttatgatgaaggagagaaactctccagagaaaacaatctgtagaaggcctgcattgaaaattcatgggggtactgcatgcttaggaagttcttccttatgtctaacttaaatcctgcctgcttcaattgtagctgttctgtcttgttgagctgcacaactaatctgtatctgtgtccctttcctgacccagtggttttcctgttcagttaccttccccccatgagcccccagaacctttctctaacccttttctctcatcagcctgtaagaatatttcagtctcacgtggacagtggcaggtactgtctcacgtggacagtggcaggtattgtctcactgggcttcctgcccactcaggccccataatcctttcccctcccagcacaggaacaaaaagcctgatgagtgtcaccatgcagcagtgtcataagaatgaaacaatcagtgacagcaacgactatcagcatttccactaatactctgaaatcagaaaggtggcagttaaaaagcacagaatcccagcactttgggaggccaaggtgggcacatcacctgaagtccgaagtctgagaccagcttggccaacatggtgaaaccctgtcactactaaaaataaaaaaactagctgggcatggtggtgcatgcctgtaatcccagcactttgggaggctgaggcgggcagatcactggaggtcagcagttcgagaccagcctggccaatgtggggaaaccccatctgtactaaaaatacaaaaattagctggatgtggtggcgctcgcctgtaatcccagctacttgggaggctgaggcacaagaatcatttgaacctgggaggcacaggtttcagtgagccaagattgagccactgtactccagcctgggccacagagtgagactcttgtctcaaaaaaataaataaatacttaagtaactaaatacagataaataaaaaataaaagcacattccatataagtgagtccagcaaaggtttggatgtgccctcccttccctgggaggatggaaaccctgctctggaggtgccgtcggcagtgggagtggcctggggttgacctgccccattgacagccggtcttactgggtgaatgctgagcttattttattttgctttctgctgttcgttaaaggatgatttcaatagagacatcttcctgaaattcaactcagatttattcatatgcgtttcccttttcaaccctttggtggctcccggctggcagagttcaggtgtcttagcacagcgtccttccagggcatatttcaaggtgctcccaggtctggccactacctacctcagtgccatcgcatccctggttacaccctgtgccttcacccctttacacctttctccggctctccacatgtttctgtgtgtgggacactcctgctttttgtcagagttttttggtttatttattttctgagacagagtctcacgctcttgcccagatcggagtgcagtggcacgatctcagctcactgtaacctccgcctcttgggttcaagtgattcttgtgcctcagcctcctcagtagctgggaccacaggccctgccaccaccacgcctggctaatttttatatttttagtagaaacggggtttcaccatgttggccagactggtctcgagctcctgacctcgtgatccgcctgcgttggcctcccaaagtgctgggattaccagcactggcatgagctaccgtgtccggccccagtttgtcttgaggtgtcctctcctttcagaccttgcgtcatgcccccagtaaagtttctgcctctccgaggggcaaaaactgttccagaagcccactgtgacaggatccctcaggttactccctgcctcacttctctaagggacacctgtcacctgcctcccacctggaggccccctgagacaggtcactgaactgaactcagcagtagaaatggaaggaatgttgaggccttcagtgtttagtacagtcttgccttctgtctttctctttctctacttggggtaaattgaggctcggtggccatgggcattagcccggcaggcctcattcagcgtggctgagccaggtgtgttgtgtcgtttcagcatcaccttctccatccccgaaggtgctttggtggccgtggtgggccaggtgggctgcggaaagtcgtccctgctctcagccctcttggctgagatggacaaagtggaggggcacgtggctatcaaggtaggatgaggaccagcggggaggggcagtggggaagctggtggtctgaggaaaagctcagaaatgatggtgtttcttttgactgtccctgtgccagaagcgaaagcagcaacgtctcttttcctcctcctcctgtatctttccactgtctctttctctctcgttctttctgttctgttccgtgctgtcctagaaggcaggattttggtatcatttatttccatctgtctcccagcacttaaaatagtgcccagtatatagtaggcacttaataaatatttattttgttacctctttattaagctgttattttattattattattatcattattattgtgtttttttttttttgagacagggtcaggctctgtcccgcaggctggagtgaagtggcgtgatctcggctcactgcagcctctgcctcctgggtccaagcgattctccctcagcctcccgagtagctaggattacaggcatgcgccaccatgtccagctaatttttatatttttttagtagagacggtgttttaccatgttggccaggctggtctcaaactcctgacctcaagtgatctgcacacctctgtctcccaaagtgctgggattgcaggtgtgagccaccgcatttggccacttaagaaatacttagtagacacacgaagactccctggtacgcagcctgtgtctccttcccttgcgtctctgcctgtcactgagtgtctcttggtctgtttgggtctttttggattgttctttatctttatggatctctgagtatctattcttataaatgtaacaaaacaaaaatgtttatgtggttggaatattttcttagaacattttttaaagggaacagtttaaatttttagtgttgaattcttaatatggagctaaaagaagactgcagttttactgcttttaaatacacagtgtactttgaagtaagttgaaattccccaggagtgagcttaagaggctcctttacaaataatccccactggaaatcaacagcctttgtttgcatttagttcactccccatgaaggccttttcctagtgtaacgacacgtccctggaagttttgctaccagcatttccaggagtgtggtctgcagccagctcatcttgcaggacatttgggcgataaagaaccccaggctcaaagaagcgtgggaaataatgcatactccagccccctccctcttggagacttacagtaaacattagcaaattaaaggctctgacaagtcctgcaaggagaaaaaatctattaactgtttaaccttatgtgtcccaggtgtacttgtccgcacctctttagtgtctgtgcaactgcacatttgtctcttggaatctgcctttgggaatgtcaagtttatgacgttgtttgttgttgtgggttttgagacagagttttttttgttgcccaggctggagtgcagtcgtgtgatcttgactcactgcaacctctgcctcctgggttcaaccgattcttctgtctcagcctcttgagtagctgggattataggcacccaccattactgcacccggctaatttttgtattttcagtaaagacgggattttaccatgttgacctgggtagtctagaactcctaacctcaggtgatctccccatctcggcttcccaaagtgctgggattacaggcgtgagccaccgctcctggcctagttaatgacattgtttttatttcagagcaaaaccctttctttgattatacagtgcctttagaaagtatacattgtggttgggtccaaattaatgacctttagctgttgttttaagaaatgttttatcattactttcaagttcctgccataaaataagatgaatgaaccatgagagctagattaatggaagaaaattccaaatcccgatgggatccacattgctttctgtttccttaaccccagctttctgctatcctggcactattagcatttcaggccagatgattatttattattggttgtttggcctaggtaaggggagtgctagaaatgtatataaaatatttatcttttcccaaatgttttagttggtgtggtttgtgtatattatgtctgaaatttctgtgggttctatggtaaggcaccactgttgacattttggctttttaaaagttaggatattcaagtcagcaggttaattatttgagaatttagagtaagaatgagggtacctgggacctgctgtcagctttgccctctctagaattcccttattcaagaatcttctggctgggcgcggtggctcacatctgtaatcccagcactttgggaggctgaggcaggttgatcacctgaggtcaggagtttgagaccagcctgaccagcatggcgaaaccccgtctctactgaaaatacaaaaattagtgggcctggtggtgtgtgcctttagtcccagctactcaggaggctgaggaaggagaatcccttgagcccggaggcagagactgcagtgagctgagatcttgacactgtattccagcctgagcgacagcaaggcttcgtttcaaaaaaaaatcttcaggggctccccttgcccctctgataaagcccatgctccccaccaagtataggcccccttgctgtccctggtgtgttttctgccagtcgttccctcacaggattgatcgatgttcctgtcacgctggcctttctgttccttgaatgtgccaagtacttttcacttccaggccttcgcatgtgctgttccctcggacttgaatgctcttccctcttctcctcatgaaactgactcattcttcactttttggttcttgtctaaacatatgtttgagctgagcatgatggctcatgcctataatcccagcacttcaggaggccaaggcaggaggattgcttgaggccaggagtttgagaccaggcttagcaacatggcaagattttgtttctacaaacgtaataaatatatagagaattaactacctcagcattttcattagcaaaatacacaaaacaaatatccttactctagcctttattctcatgctgtttgtgatacctgacatatggaaataaaaataagcctttgaaatggatgcttgatataggagtctttgcttcaatttttagcaaggatatttcctcaaagatccttcccggatgtcccaaactaggtcagtcttttaatttttttgagacaggatcttgctctgtggtccaggctggagtgcagtggcacggtgcaatctcagctcgtggtacctccatttcctgggctcaggtgatcctcccacctcagcctcccaagtagctgggactacagatgcacagcgccatgcctggctaatttttctattttttttagagatgggatttctctatgttgtccaggctggctttgaactcctgacctcaagcagtctgcctgccttggcctcccaaagtgctgggattacaggcatgagccactgcgcctagtcaagttagactcttaaaaagtgtcatatatctttttatctttgcgtccaccgtaactgtaatcaagtagttttccgtcacctgagggacttccactctttggaagcaggggttttgatcaccgctgtaggcattgagttaatagctagctactaagtaaataactgtaatcttatcaacgaggatatcaactctttgactcctgatattggagtcagtgattcacctgctgtgggttctgatcccagccctggcatctgttgtcctttgtgagtcagtttccctcttgccaaagcaatagttgtgatgaaaatgacttgtgaagtgaggccctcctagcaggcgggtgggccagctgttgtctcgttgatcagatctgtctgtgtgtctgtctcacctcgttctccatttgcaacttagggctccgtggcctatgtgccacagcaggcctggattcagaatgattctctccgagaaaacatcctttttggatgtcagctggaggaaccatattacaggtccgtgatacaggcctgtgccctcctcccagacctggaaatcctgcccagtggggatcggacagagattggcgagaagttcagtataggttggatgttggcccctgaatcagtcagctgttgccgcgtaacaaatgctctcacaatctcagtgggctgtgagtctgctgctatcagctgacccggcagggctcagctgggcggctctgctgcacgctgcaggccagctgaacttgggtccaggctgtgggtgtggctcaggtctcacttacagagcttttgctggggaccggggtgaggggtccacagctttccaaaggggggctcttctcatggtggcagcagaggcccaagataggccccccagaaagcatgcaatgtcccttaaagtacactgtcccttctactcacaaagcaagtcacttggccaagctcaaaggcaagggaccaagaaggaagtacattctacctttgtggtcacatgactgcagagtcacatgacagagggcatgctgttgggaggaggggagtcgatgattcatatgttcacagtccctgtcaagatagccataatactgaaaatagcacaatagctaacacttactgagcattttctctttcttttctttctttctttttatttatttatttatttttgagatggagtcttgctctcttgcccaggctggagtgcagtggcacgatctcagctcactgcaacctctgcctcccgcgttcaggtgattctcctgcctcagcttcctgaggggctggaattacaggtgcatatcaccacactcggctaatttttgtatttttagtcgaggcagggtttcaccatgttggccaggttggtgtctaactcctgacctcaagtgatccgctggcctcagcctctcaaagttcttttttttttttgaaatggagtctctctctgtcgcccaggctagagtgtagtggctcactcttggctcattgcaacctctgcctcctgagttcaagtgattctcctccctcagcctcttgaatagctgggactacaggcccctgccaccacgcacagctaatttttgtatttttattcgaggcagggtttcaccatgttggccaggttggtgtctaactcctgacctcaagtgatcggctggcctcagcctctcaaagttctttttttttttttgaaatggagtctctctctgtcgcccaggctagagtgtagtggctcactcttggttcaacctctgcctcctgagttcaagtgattctcctccctcagcctcttgaatagctgggactacaggcccctgccaccacgcacagctaatttctgtatttttagtagagatgggatttcgctgtgttggccatgctgatcttgaactcctggcctcaggtgatctgcccgcctctgcctctcacaatgctgggattacagatgttaaccacctcgcccggcctataacttgagtattttctgtatgttgggaactatgctaaacattttacacgtaattcttccccacagcaagcccatgggtggaatttgttgttatacctaggtaatcattgaggaaaaaggaggcacagagaggccaagtgacttacctgaggccacacagccacagagctgcagagagcatggttcctgtgtccatgttgttacctgctcattttgtcatctctaaaagggccattctctgcctctcaccactgcagaccctccctcctgctgtgctccatctcccaggttttcctgctgcttcacagcaacccccagcccctgcccacctccacaccttggtctgagccttcaaggcctggggtgcctcccctgctgcttgcctggccactttgctctggcaccccatggtggtcgtctggtgtgtcccctcttggaagaccaagcagtgcaaagcactggcccatttctgtttttagttacaagccagggctctgtcggctttcttacgtggtgaatgatgtttaaaaattgagataagcctgcagctccttggaaataaaaaacgaattattggctgggcgcggtagctcacgcctataatccccagcactttgggagaccaaggtgggaggattgtctgaggtcaggagttcgagaccagcctgggcaacatggtgaaaacccacctctactaaaaatacaaaaagttgccaggcatggtgccgtgcacctggtggtcccagccacttagggggctgaggtgagaggattgcttgaacctgggaagcggagattacagtgagctgagattgtgccactgcactccagcctgggcgacagagtgagattctgtctccaaaaacaaaaagaaggcacgtggctgccaggaccccacctcagtgcatgggagtcagggcaggcatctcaggagggactgggcagtaacctgtgatttccagccaaatagggaaacgacgttggcttatctgtcatggtgggagctggcgctgctgctggtccatgcattgtccttcctcctggtgactgggatgtgggctggatttcagcatccccaggccggagccttgcttcacctatatgtggctttgccagacagtgacagatccagagtaagctggcaaacatggcagctgtcaccaacagcagcagtaacaataatatgaccacgtccaccagcgccttccatgagactaagggatcacggccttcccactggtcaacatgatttggtgccgtcagccatcctttgctgagcacttgctgtgcaccacgtgccctgctcagcacctcacgggagattcaggttttctcttttgcccagttgacaggtggggctaaaccctgtgcctgtgatcccatccttggtggtggtggagctggggcctggctccaggtttgtgcaggcgtgacctcatgccttcagcatcaaacttaaagaagaggaggtgggtgcagctctgcagggccttcacccaggacctgctgtgtcctgagcaggctctatgcctttctttctttcttgtttaaagagacagggtctcattctgtcgcccaggctggagtgcagtggcccagccatagctcgttgcagcctggaactcctgggctcaagccatcttcccactcagcctcctgaatagctggaactacaggcgcacatcagcaggcttggctaattttttcttttcttttcttttctttttttgtagagacagggtctccctatattgctcaggctggtctcaaacccctggtctcaagcagtccttccaccttggcctcccaaagttctgggatcacaccacactcggcctgcttctacgtattgtgagtctcaagatttcccaggaaacccactcctgtgtgtgtctctccccagggcgtgaacctgtctgggggccagaagcagcgcgtgagcctggcccgggccgtgtactccaacgctgacatttacctcttcgatgatcccctctcagcagtggatgcccatgtgggaaaacacatctttgaaaatgtgattggccccaaggggatgctgaagaacaaggtgcctgctggcggggtggggcttggtgttgggccgtctcgccctttggttaagtcagaacgtgtcccctttaggagtcctttactttctctggctttctttgtttttaattggactttaaagaacacatttctcatgcttgtcttggaagccttcctaagacagccgtcttgtacttgtctttataggggtaagtcctccgcgcagagttaaattcattgcctctccatggccaagggaggcctctcttcctgattaagtcacagggctggcttcttagcggggaatcccactccaagacattgcctgtgacctagcaggctgcattttcttacttgcagaggtgtctgtgggtagaggggtcggaaaattgccacaacaccttaacataataggaaatagttcctgtgttctttttatagggcagttgtggtaatgggtacacactggctcttttttttctccccctgattttatttttttgaggtggagtttcgctactgttgcccaggctggagtgcagtggcatgatctcagctcactgcaacctccgcatctcgggttcaagcacttctcctgctttggcctcccaagtagctgggattacaggtgcccaccaccacgcctggctaattttttttatttttagtagaatcgaggtttcaccatgttggtcaggctggtctcgaactcctgacctcaagtgatctgcccgcctgggtctcctgcaatgctgggattacaggcgtgagccaccacacccggctgtttctgctgattttaaaactaacacatccccatggggggcatatagattaagaaaaacatgaaaaagaaaaatggaagcagttacacacattccactggttagaggttttgtatttttttcaagtctttttgctctgtgtataaactttttaaatagggttatcttgttccacgtatatatacaggaaacatcgtgctacatgacctcttgtaatcgttcccatacataccactaacattctgtgtaaacatattttaaaatagtacaaaacatttttgaaaattactaagtaatacatgcccattgtaacaaaattgaaaagtacaagaatatggatatcttcttataatatatgtgtgtatgcgtgtgtgtgtgtgtgtgtgtgtgtgtgcatgtatataaagtaaataaagctgggcacggtgagtaatcccaacacttttggaggcctagaccagtggatcacctgaggtcaggagttcgagaccagcctggccaacatggtgaaaccccatctctactaaaaatacaaaaatcagccgagtgtggtgatgcatggctgtaatcccagctactcgggaagctgaggccggagaatgtcttgaacccgggacgtggaggttgcagtgagctgagattgcgccactgcactctagcctgggtaacagagcgagactccgtctcagaaaatatatctaaataaagtaaataaaatagtccctcttcatcctgcatccctaatctttaattcttctcttagagagcaagggttagcaaatctggcccactgcctgctttttatatggctcttgagctaagaatgatgtgtgtatttttaaatagaagaaatctaaacaggaagaatattttatgacatttgaaaatcgtattaaatttagatatcagtgtccataaataaaactttattggaacatggccaatgtattttttttctttttttttctgcagacagggttttcctctgttgtccaggctggagtgcagtgccacagtcatggcatggtagcctccagctcctcggctgaatcaatcctcctgccttctgagtagctcctgggaccacaggcatgcagcaccatgcctggctaatttatttttatttttattttgtggagacaggtctcactatgtttcccaggctggtttcaaactcttggcctcaaggaatcctcccgttttggcctcccaaagtgctgggattacaggtgtgagccaccgcacgtgtcctgttctttaaagcatcgtctacagctgcttcaactcggcagggctgagttggtgccatggcaactgtaagatccataaagctgaaaagattgaccgttagctgtttaaggaaacatatgctgacttctattaatagtttgatgaatgtcttcccaaactttcagatttgcagataaaatgtatgcatgtgcatattttgtagtggttttgggggtggctgacagcgggagttgttttagaaaaaaattaagccagagctgggcacggtagcgcatgcctgtagtcccaggcacttttgtaagccaagggcgaatggatcgcttcagttcaggagttcaagatgagcctggacaacatgatgagacccctgtcttgacaaaaaatacaaaaattatctgggcatggtggcacgtatctgtagtcccagctacttgggaggctgaggcaggagaatcgcttgaacccaggaagcataggttgtggtgagccgaggtcgcaccactgcactccagcctgggcgacagagcgagaccctatctcaaaaagaaaaaaaaaaaagaagaaaaaaattaagccattgggctgggcgcagcggctcacacctgtaatcctaaaactttgggaggccaagataggcagattgcctgaggtcaggagtttgagaccagcctgggcaacatggtgaaacgccatctctactaaaatacaacaacaaaaaaatcagccaggtgtggtggcgggcgcatgtaatcccagctacgcgggagggaggctgaggcacgggaattgcttgaacccgggaggcggaggttgcagtgagccgagactgtgccactgcactccagcctggacaacaaagtgaaactctgtctcaaaaaaaaaaaaaaaagccattgcatacaaactgttttgctgtggcaccatccttttattcctttacacacttgtatggttccctccctacctcttgtcattcaggtttttgttaaaaaataaccttccccattacctttgttaaaattgcaaaacccgcacacttggtacacccgttcccctttttgctgtgtttttgccattcagcaagcactattctactagtgttcgtttctcctgcggccctggaatctggggcaggggtctttgtttccttccccttccccagcttttagctcagcacctgaggcgtggcaggccctttgcacatgcatgttacaggaccgtgtgcacaggttcagctgctcctggatgctgttatcgcgggtgcatgtcccaccttcagacctgagttttgcccaccaggtgttcgtcggctcattcctcctttagtcttcactctgccaagctaggcagtctcacacatgtgcactcacgtggccgggtgtcccctttgcccacagacgcggatcttggtcacgcacagcatgagctacttgccgcaggtggacgtcatcatcgtcatgagtggcggcaagatctctgagatgggctcctaccaggagctgctggctcgagacggcgccttcgctgagttcctgcgtacctatgccagcacagagcaggagcaggatgcagaggagaacggtaggggcagccccagggttccacccactcagggtgtctggcaccttgaagggccacattggcctctttgaggttgccaccagccacttggggaaggcggctcctcagggcatgagggtgggagctggatggagccccctaaagaagcaatgtggaaaaccaccttagtccctgcagtgctgaactgggagagagtctcggtgctttatggccaggggatgggagcaccaggcttcagctcagctgacctcagggcagggtctagcgccttcctggaacatgaccttggacctgatgagtttcagggtccttatggcaaaaatgggaatgatggtaattaaagtcctggctctcggggctgagagaaactgaggacatacgtgacacaagagatgtgagggttgtgaggtgaagcacggagttaagctggcaggctcgggttggtgacgtctgggttcaatccccggccgctcatctccccagctatgtgacctgaggcctgcccttcagacccatctgagcttcactttcctccctcataaagcagttcagcagggccagacgtggtggttcccagcacttgtaatcccaacacatagagaggctgaggtgggaggatcgctccagctcaggagtttgagaccatcctcagtagcatggcgaaacctcatctctacaaaaaatacaaaaaatttgccaggcacagtggctcacgcctgtaatcccagcactttgggaggccgtggtgggtggatcccttgaagccaggaggaattcaagaccagcctggccaacatactgaaaccccaactctacaaaaaaaaaaaaaaaaaaattcagatgctattaagtgctttggaggggaaacaaaaaagacaatgccatgggctgaggagtgatgggtgtcattgtggcaactcaggcaggggatagggaaaccctctctggggaggttgcattggcatgggaaggagccagcagggagaagatctgggaagtgttgtgggcagagggaacagccagtacaaaggcctcaggaccagcatgagctcaatttgtttacaaaacaaaaagggtggtgtggccagaccatggtgtgccaggacgtggggggcaggagaagaggtcagcacagtgattgtcctgcagggccttccaggtgggttttggtctaactgccctgggaagccactgagtgtcagagaggcaaagtgaccagccccaggatacacagcagctgctggcagggttggttctcaagttggtctctgagtttctcatcctttgcctggggtgggagctccttctctgcagaggtcctagtgatctctaataagtgctttcttgagatgtaattcacacacgtaggctgggcgcagtggctcacgcctgtaatcccagcactgtgggaggctgacacaggtggatcacctgaggtcaggagttggagaccagcctggccaacatgatgaaaccctgtctctactaaaaatacaaaaattatcctggcgtggtggcgcacgcctataggcccagctactggggaggctgaggcaggagaatagtttgaaccttggaggcggaggttgcagtgaaccgagatcgtgccactacactccagcttgggcaacagagcaagacttcgtctcagaaaaacaaaacaaaacaaaacaaaaattcatacaacatacaattaacccacttaaatcacaaaatccaaccatcaccacagtcaggtttagaactttttttaatcacccccaaaagaaaccccaatccatcagccatgactccctattttccccagcacctccgaagccctaggcaaccactaatctttctgtctctctagatttgcttattctggacatttcatataaatgccatcacaataggtggaatgttgtgactggcggcttttacacttagcgtggtgttttcaaggttcgtctatgttgtagcttcatttccttttattgcggaataatatgccattgtgcagatagaccatactgtgttgatctgttcactggttgatggacattcaggttttttccactttctgactcttgtgaatactgctgtcatgagccctggtggttttaaaggaaaagttggtggccgggtgtggtggtttgtgcctgtaatcccaccactttgggaggccaaggcgggtggatcacttgaggttaggagttcaagaccagcctgggcagcatggtgaaacctcgtctctactgaaagtacaaacattagctgggatggtggtgcacacctgtagtcccggctattcgggaggctgaggtgggggaatcgcttgagcctgggagtcaggctgctgtgagccaaaatcatgccactgcactccatctggcctgggtgacagagcaagaccatgtctcaaaatacagttggatttttgtttcttgccagtgcatgatagctgacattcccttcagcttttaaattatttgattagactgaatttctgcatgttcattcccttgtggttgggaagttctaccttgagtctagcctgtttcttcttgctgcagaatccccctttgtctatctctcagcccgagcaatgcattgtggcaacttctcggtgactttttcactgacctgcttggcaggctacttttaggtgacaataccctttgtgctctctaaatcaaaatgtgtgggtttagctgaatcttttgcccagcgtgaggtctgtctctctacccttccgtccaggtgagcaaaaaatgtccttaaactctcttggccccagataggttccgcacccccgcctttctttcccagctgctagagtatccaagcagtgtatacagaacatggaaggctgccagatgctttgtgatttttgtacacatcagcacttaatttggtgatgcaaatgccgcccaccaccctggcacctcgtgcgttcattttcccagtttgacctccctacctcctgcctttgaggttacatagaagtccttggcagtgggtcttacatcaaactggggcacccccctctctcaccacccacccttttccattgctctggaggggccctggctataaagtcttgacatcagggtctggtcttgcccagccttagccaactcgaagcgccaatgaccttgggtttgtttaaaccacatttttggctcttcctaaaggggaacttttttccttgttggattaatcagctcttttttttagaacacccaggctgaaggggtgcaggtgttggtatttggtttgggagaatccttgaggggggatgggcaggaaccaggcttgtgaatggggccataccgacctctctcccgggatattcagtttactgatttctaagaaatatatcttttttactgtttgtctccctctctccttttttttttttttttttttttttaacttttaatggcattccttttattcctaatttattcccatgccataagcttttgtttcttcaatttcttctgggatatatttttcttctgtgcagcctccccttccggtttaggaacagtttgttccctttcaggcaggatcatctggatgtggcagagtgagctcacgtatgggttaatccgaccgaccctgagctctgtaggtccggcgacgcaacttaggtgctttcttcagttggatatgctcaaggaccagagaatctgcatctgaacccttaagttcagtgtgactctctgtatttttaagcatgtgcagcagaaattcagtgctctttttgggccgccgaccttgtggccagccccacttcttggcctgggtacatctaccaactccaccattataatgtcagaatggtacatgttgtttctgtaaagtggcatctttctgatactttgtggccttttgtacgtgcatacctttgatggcctgggcgctttcaggagtgttctttttctttttcttttttttgagacggagtcttgctctgtcgcccaggctggagtgcagtggcgcgatcttggctccctgcaagctctgccgcccaggttcacgccattctcctgcctcagcctcccgagtagctgggactacaggcgcccgccaccatgcccagctaattttttttgtatttttagtagaaacggggtttcaccgtgttagtcaggatggtctcgatctcttgacgtcatgatccgcccgcctcggcctcccaaagtgctgggattacaggcgtgagccactgcgcctggccttttttttttttttttttttttgatacagagtctcacttgttgcccaggctggagtgtagtggcacgatcttggctcactgcagcctccacctcccgggttcaagaaattcttgtgcctcagcctctcgagtagctggagttacaggcatgtgccaccacgcccagctaatttttgtatttttagtagagatggggtttcaccatgctgaccaggctggtctcaaactcctggcctcaagggatcctcctgcctcagcctcccaaagtgttgggataacaggcatgagccaccatgcccggcctcacaaatgttcttaaggtgaacacgaagatttgaacctcttgatctgcatgattctgtggtgttttctggataaagtgaatagtgaaccattttcacagattgcctcaagccccttaggggaacaaatttttaagggatttaaaaaaatggctcattaaccttcatacctggaaggtaaaacacatcttcatgactctggtttctttcttaggaacctaatacctagagcagtggttttccatcaggggcaaattgcccccaccctggggacagttggcaatgtttggagacatgttgggatgtcaaaactggagtggggtttgcccctggcaggcaagcagggtagaggccagcgatgtcgctaaacatcctacagcactcaagacgaattcccccttaccctgccccccgtgacagggaatccccttgccaggacatccaaagcaccacgagcaagaaaccctgtgtgctccgacttcacactgctgaattcttcccttgtcctcttgggagaaggatctttattccaacaatgtggccatttttctcttttaaaaaattttatttatatatttttatgtttttttatggagatgggatatcagtctgttgcccaggctggtctcgaactcctgggctcaagcgatcctcccaccttgacctcccaaaatgcaaatgctgggattataagcatgagtcgcggcacctggcccgtggccatttttcaaaaccttgcttgaaccatctgttaacctcatggcaaatatttttccctcttaagtatttaccgagtttttcttaatgattataaaagcaacatgtgctcatcgtagacatttgcaaactacaaaagagtacaaagaatcaggaaaaaaggtggctcatatgtgtaatgccaggactttgggaggccaaggtaggcggatcacctgagggcaggagttcgagaccagcctcgccaacatggtgaaaccccatctctactaaaaatacagaaatgtcaggaggctgaggcaggagaatagcgtgaatccggggggcagagcttgcagtgagccaagattgtgccactgcactctagcctgggtaacagagcgagactgtctcaaaaaaaaaacaaaaaaacaaaaaaaaactcccgagaaagaacatctttctgccctcactgcccagaaggggagctgttgttagctttggcatctttttcacctgtccttccttcctaggccttctcccttgacaagattgagagtatatcttagagttttctcatctcctgccaccttttgatttcttttcttaacagtgggccataagcacctccccaagttacacaaattagttgtcagcacagagcagctgccgagagagttcatcagacagacccccacattccttctggctgtcctcagaggccggatttcttcctcttttgaggatgaagagctttctctgccgaggctgggggaggaggtcagtgaggcagccagtgaatgccgtttttggtcaaaaatgaggcgttgactataaagctgtgagttgaattcttccctccggggaggctggcctgctggaccttgcccaagcagagttccagaaccttcttgagtaaaggcagtgttggtggaataaacagtgagaggactggcaacggaatacacagacccggggcagcacttaacgtacgtgggtcaagggtagaaacagcacctggcttgacagcatccaaaacccaacacctggtggttgcatgaactcagtgacagtcactgaattacaagtttcgtgtgtttgctttaaaaaaaaaagaaagaactcttgctactttatagcattctccaccctggcccccagccttcatgtccctcttcttccctgctttgattactttgtggcacttattgctgcctggagtaaattatggatctacttgttcatttattgttgatctcttcctttggaatttaagatctgagggttttgtttgtttgttttgttttgttttgtttgttttgggagtctcacgctgttgcccaggctggagtgcaatggtgcaatctcggctcactgcaacctccacctcctgggtccaagtgattctcctgccgcaacctcccaagtagctgggattacggatgcctgccaccacgcccggctaatttttgtatttttagtagagacggcgttgtgccacattggtcaggctggtcttgaactccggacctcaagtgatccacccgcctcagcctcccaaagtgctgggattacaggcatgagccatcgtgcccggctgctctgagggctttttggttgtctctccatccccaggactaagaaaagagcctgacacatagtagacactcagtaaatgtgttaaatgagtggatgaatcgcaccttggctgttcaaggcatgtcctgcataagcagtgggtaggccggagggctttggatgtttacactgcagataaatacctcagactaggagaaaataggagtggatttcaccccctctcaggtctgctttagaaagcagctttgtcagtcctgcctatgagaggggcccctctggcattgggaagtcagctctgcttcttgacttgactatacacttgtcagtctgcccatctgtctgtcgggtgtgtacagagtgcctgctgtgtgccacaaggccacctggtacgtgagcctctgtgtggaatggtgccccccacgttgagttgtgcagtgtgcatcttgtgtaactgcacttggccacctgctgtgccaggtgctggtgatacagtaatggatatgacccacttcatgcccttgagagctcacagtctgatgggagagacaaacgccaaacaattaagggtatcatagtgctaaatgcagtgatggagggctgcttgagggcctgggaaatcacagagaaggagcccccatcccagcctgggagggtccagggtgatatctgggctaagtcaccttttcttctcctcttgggcacatgtgcatctggctctgtgtggggccagcccctctcaggagcagtgtctgtcctcaaaggggctggagctgatgcccatgccacctcccagtgtcatgcctggcctgcctactgtaatactttatttcttttcctctcctgcgtaaaaacaagcctgaagactgaaggttggtctgcattatttgtttagctctatttatggttaaacacagttatgactttggccaggcatggtggctcacgcctgtaatcctagcactttgggaggccaaggcaggtgtatcagctgaggtcaggagtttgagaccagcctggccaacatggcaaaaccccgtctctactaaaaatacgaaaattagccaggtgtggtggcgggcacctgtaatcccagctatttgggaggctgaggctggagaattgcttgaacctgggtggcggaggttgcggtgagctaagatcacgccacttccctccagcctgggctaaagagtgaaactctgtcacaaacaaacaaacaaaaacccaacacagttatgactttggagaaaggggttggtcttgtgcagtgtgcttgtcccggatccacccagcacatgtgggatggggaaactgacgcacaaatggagcagacccttcagccattcttgcctctccccctttagaaaagacactcccttcactcctttatttagataggggcttagggcgggagtttcgctttgcttcttaacaatatcttgggtcttctgaattcccaggcagcacagtgatggacgaggaggaagcaggtcagtactgcccgggttggagttggcttggctcatagaatgaggccagagacgggccgagactgtcgctgcatgtctggggaggtgccgtcagatgtctgtgttttcacccctccggttgttcattggttcatttagcacacatttactgggtacctactgtgtgtctggctttgaggctggcactgggggatacagcctgagtccccagatccctttattgtcactgatgaccttgggtaagctctactgtttcatgcatcacgttaccgtgaccagcatgccttgaggggaccatgcttatgaagtgcctggcacacagtggatggacaataaatggcaacagtttgattgtgagctgccacgcatagatcctggggcacagtcaagacacacatgggcccagacaatgcagggtgatcagcgcctgttggggaactgcagcaggtggtggtggggaccctgaagagggatgtcgcctagtggaattccagtggccagactggacccatccctcctgccttctgcagtgtgtggcttagggtcccagccaagggctttttttgtaagcagcagaagctgaatctggccaccttaaacaaacagagggtgtttcctggaaggataccaggtaactcatgaatcaaaggcagaactgagcaagtaggactcaggaaatgggaactctgggagactagactcttttaggacaggtgaacttgaactgtctttggtccttgtagaccactgatgacggttcaaatcctgggagaggggcttttatggggcgacctcagacagtgcccaccttggctgggggaatctgaggcaccctgattgacaggcccaccaaggctgtaggaagagggagagctgatcccttcaaaaagccaacagggggccaggcacagtggctcacacctgtaatcccagcactctgggaggccgaggtgggtggatcacctgaggtcaggggtttgagaccagcctggccaacatggtgaaaccccgtctctactagaaatacaaaagaattagccaggcacggtggtgcatgcctgtaatcccagcttcctgggaggctgaggtgggaggatcgattgaacccaagaggcagaggttgcagtgagccaagatggcaccagtgcaatccagcctgggcgacagagaagaccttgtctcaagacaaggaaaaaaaaaaatgctgagaggatggtggactaactgatgttcagattcctcctcttaggcgcttggtcctcctccgtgcagagtggaattttccagctgcccagttcgacctgtgggctaattggtgggttgagagggtaagacagccttagcgagcactgcatgcctgcagaagctcccagctgaccatggtggctgcgctcagtgacgaacaggagaagtgaaggctgaggcttataggagggtggcctgaggctgctggtaggagaggggggggctctctgcggcatgcagcctccagatgggggtccctgggagtgttctggaacattctcatccctgcacagagaaagatggttaagggcatggctggttcccagtgtcacacatgtgtgtgaggacaggctgcatgggaagtcctgcttggtatcattcttccttcctgggtgatgtggctatttgtgttttgtttgttttttaagttagtgtttagttagtttagacaaaacaaaacagatgctgacattaaagggaatgtttaaagcagagtttctcagttcctggctgtgcctagaattctctgtagaacctgtttaaaaatgtatttagtaataagcaacacgggggtcgccatcactgaacacttgctgtgccaggcactgcgtgcagtctcgtttcaccctctcgcaaatgaaggttgggtctgctgttcctgttttgcagatgtggaagatgaggctcagacagatttatcatttccccaaggggcacagccaggaagtgagagaacacttcccacatatcacagttcctggagctctaatcgagactcatagcagggactgggctggacacgagggcacctgctcagtttttaattttaattttttggtttattttcttttattcgtgttttttagattttttttttatttttattttttatttttatttttagacagagtctcgctctgtcacccaggctggagtgtggtagcatgatttcagctcactgcaacctccgcctcccgggttcaagcaattctagagcctcagcctcccgagtaggtgggattacaggcatgcaccaccacgcccagctaatttttgtatttttagaatagagttggggtttttccatgttggccaggctggtcttgaactcctggcctcaagcgatctgcccgcctcggccttgaaagtgctggggattacaggtgtgagccaccgtgcccggcggccacctgctcatttataaagccccccgtgactcatttacaaccaagactgagaattcctggcatggagtgcctccctctgtccaggaatgatctgcagccccctcttcccttccaggtgtgtctgtgtctccctgtggctgtttctgcaagattttgcatttttgagctctgcttttattcatgtcatcacccgagcatgttcccaggggtcaccctgaccatgctgctggctgcgtatttatcccttttgtatcttctgtcctgggtcctctcccaccttctctggggtcagccctgtggtgccttacattgtgctgctttctctcctggcaccaaagaatgaggcagtcagtgcggagtgggggcagtagtcatcatcatcactgagttattgtgaaccgggaaagagatatgatctgtgttgacacgacacacggtgcccgagtgcacttgataaatgttggctgtcattgtcattgttgatgttccggtgattattgttgatgctgggtggattcttcctgggatcagggcagatatccagctgctgtgtcccttggtgtccttatcagtgtccttcctaattctgcaaccaaggcatctgccagggctggggtctcatctgaagactcaatcagggaagggtccactttgaagctcacctggttgttggcagaacttggttccccagttcaaatgttgaaatactttattactgtggaaacagccactgccccaggtaccttttaccctgaactcttgggacctctctgtggtctaggaactgaagggttaactcctggcactacaggggtctccgggcctctgcctgttggctgatggccttgtcaaattggttatctattttgaatatcacttcttctttcaatgcttgggaatcacggggctatgccctttccctcatgcgtttccttgcatcctggtcctaggaagtgagcttaacatagcagggctactgttttctgggctgggttttacccattgctgctggcacaggatgctggctcaggcccagtgccctcagtggatggagccttctgcacagttgcaaagcactgtccctaccccaagggactgagctcccagataccacctgccccacaaccagacagcctgttcatggcctctgcagagcaggtctcctactttctgatcatcctggcggccaggtgctctgtggtctcctcactgaagtggccggtttttgttgcccttggttttagcatctgcctcatataaccccacttgccccctttgtctctcttctgccaggggtcacgggcgtcagcggtccagggaaggaagcaaagcaaatggagaatggcatgctggtgacggacagtgcagggaagcaactgcagaggtaagggcggggaggaaggccccaacctaaggaccctgccctgccagtgggaggacaagaggaggaacaaaaaaaggcctcagccccctgaggtcctggaaggcctgggcttttaccttccctcccaaatcctccaaggaccttgcttttcagagtacagaggcccaaagaaggaatgtggcactctttttgccaggtggcacaactcacacaggcctcatgatttaaccagctgtccacgcttctgacactcgggctccctacatggtgtgggtctttgctcaggtctcttggcggggcctggaaggttcaggctttgtgaagcagcatttgatttaaaactgtctcaaggccaggtgtggtggctcctgcttgtaatctcagcactttgggaggttgaggcaggaggatcgcttgaggccaggagtttgagaccacagtgggtaacatagcaagacctcatctctacaaaaaaggaagtatgctcgtgtttgattatagagggcttccttagatccctggggatttatagcgtatgcagtatattaaccatcctagcttttaaaaaactggctaagtcggccaggcagggtggctcatgcctataatcccagcacttcgggaggctgaggcgggcggatcacctgaggacaggagttgaagaccagcctggccaacatgatgaaaccctgtctctactaaagatacaaaaattagccaggcatggtggcaggcgcctgtagtcccagctactcgggaggctgaggcacgagaatcgcttgaacccaggaggtggaggttgcagtgagccgagattgcgccatggcactccagcctgggtgacagagcgagactccatctcaaaaaacaaaaacaaaacaaaacagcagcagcagcagaaaacagtaaaacaacaacaaaaattgacaaagtcggagcctaaacgtatcagaccgcggagatctgagaaaggatcccggacctgcagttgctacaggggtcaggagagagcaaagaccatgcggcatagcacggtgcctggaacagacaaacacttcgtagatgtcgcttttgccatggttatcatccggacatggttatggtccggaattggtgggtcttggtctcactgacttcaagaatgaagccgcagaccctcacggtgagtgttacagttcttaaaggtggcacgtctggggtttgttccttctgctgttcggatgtgttcggagtttcttccttctggtgggttcgtggtctcgctggcctcaggagtgaagctgcagaccttcgcggtaagtgttacagctcttaaggtggcgtgtctggagtcgttcgttcctcccgctgggtttgtgctctggctggcttcaggagtgaagctgtagaccttgatggtgagtgttacagctcacaaaggcaatgtggacccaaacactgagcagcagaaagatttatcgcaaagagtgaaacaataaagcttccacagtttggaagggtaccccagtaggtggccactgctggctctggcagccagcttttattctcttatctggccctacccacatcctgctgattggtccattttacagagagccgattggtctgtttttacagagtgttgattggtccgttttgacagggtgctgattggtgtgtttacaacccctgagctagatacgtaagttccccacatccccactagattagctagatatagagtgttgattggtgcattcacaaaccctgagctagacacagggtgctgattggtgtgtttacaaaccttgagctagatacagagtgctgattggtgtatttacaatcccttagctagacataaagggcctccaagtcagcaccagactcaggagcccagctggcttcaccaggtggatgccacactggggctgcaggtggagctgcctgccagtcccgtgccgtgcgccctcactcctcagcccttgggcggtggaagggactgggcgccatggagcaggggcggcactcgtccgggaggctcgggccgcgcaggagcccatagcggggaggtggggaggctcaggcatggcaggctgcaggtcccgagccctgccccggcggggaggcagctaaagcccggtgagaaatcaagtgcagcagctgctggcccaggtgctaagcccctcactacccgggctggcggggctgcccggcagctctgagtgcggggtccaccgagccgacgcccacccagaactagcgctggcccgcaagcgcccagtgcagctccggttccctcccgttcctctccctccacacctccccgcaagctgagggagccggctccagccttggccagcccagaaaggggctcccacagtgcagcggcgggctgaagggctcctcaagcgctgccagagtgggtgccaaggccgaggaggcacagagagcgagcgagggctgcgagggctgccagcacgctgtcacttctcaatcttacacagcctaaattctagtgggagactccagacagtgcatgagtgtagaaggatgtaagattttctgtcgaggtgtgtggatgtgtgaagtcctaggtcatgaagcaggaagccccagctccccatttgaattctagattccatccagagttggttccagttgctccctctgccactccctgaaaactcactcttgctttcagatttgagggccacttccacctcactaggccttaactaaagacctttgcacagatctcatgggtaaggaaagtttacccaatcccaggcgctaattcaaagaggggaggtggtggaggtttattcggccttcaggaagtgttttcaggggacacagttctgggggtgcagggatgactcatatggggctcttgacctcagttagcttataatcttgtgcaggagataagtgggtagaggaaagtatagaaatttccacggcagtgagccgcagctgtgttttgcatggtctccataatttcttttcttttcttttcttttttttttttttttgacatgagtctccctctgtcgcccaggctggagtgcagtgtgcagtggcgcgatgtcagccactgaacggaaaactgtgggcgacgcaatctgtgatcatctctgggggtctgcataaagctcatgaccactgatgtgcgaaaagtgcttttttttttttttttgagacagggtcttactcagtcgctgaggctggagtgcagtggtgcaatcacggctcactgcaatttctgcctctgggattcaagcgattctcctgcctcaacctcccaagtagttgggactgcaggtgcacggtaccacgcctggctaatttttgtatttttagtagagacggggtttcaccgtgttggccaggctagtcttgaactcctggcctcaagtgatccgcccacctcggcctcccaaagtgctgggattacaggtgtgagccactgcacctggccaaataatgctttctgagtaacacgcttgcatgaaggagcagtcaggcaagatcccaccccagtgcccaccacatttgtaaaacaagaaaatcgaactagctgggtactttgccctatgtttttcatcatatgttacattttgaatctttttcatgtttgaaaaatgatctacgatgtgccctttctgttatatcttttattggcttttttttttttgagatgaattctaattgatctcagaaaaaaaaaaaaaagcacgcactttttatataccagttgtcatgggctttttgcaggcccccagagatcatcacagattgcgtttcccatgggtctcattcctgcctgagacactgcctttctctgggtacctataaacctggagagtgacatggtgggggtgtggtgcatatattcatatatatgtttacatgtgtgcatgtggaaacactccgtctcttatgccatggttcagacccacaatagcagtcccagcagggagccctccgaccctgcccaaggcatctgtacggttgacacccttgtgctttgcttctccagacagctcagcagctcctcctcctatagtggggacatcagcaggcaccacaacagcaccgcagaactgcagaaagctgaggccaagaaggaggagacctggaagctgatggaggctgacaaggcgcagacagggcaggtgagattcgctccttaagtgatgatagtggctggagtttatagagcgcccactgtgcactgggcactgtgcaaagtgccttgtctatgttaactcacctgtccatcacaacacacctgtgaagatactatttgcagcaccagaaactgaggccagagaggctaagtgacttactcagggtcacccctggtcagcggcagaactgggatttgaaccctggccaactccagggttagtacttgtagtctctgctctattgactgcctgagcagctcaggggggtctcattcgctagaggtgagctggatgctttaaatcagggcttcctgcaacgtggggttcagttgtgcatgagatggtgtccggttgtgcacagacgcattaaatgacagaggaatgtttgtttcatttctttttttaatttttatttttttgagatggagtctcactctgtcaccaaggctggagtgcagtggtgcgatctcggctcactacaacctctgcctcctgggttcaagcagttttcctgcctcagcctcctgagtagctgggattacagaaacttgctaccttgcccagctaatttttgtatttttagtagagacagggtttcaccatgttggccaggctggtcttgaactcctgacctcaggtgatccacccaccttggcctcccaaaatgctgggattacaggggtgagcaccgcgtcctgcctgtttttcatttctcatttggtcctaatgattacgtccctgagaaagtcccagttgggtcctaccctgccttctcaacctatcaaccactatcctctctttgtaacaaggagaccgggttttgagctcctgttttattgtttttaaagatcgtctattttggacaagtgttaataattctccatttatggtggtgatccaaagtttatttttaaaaataaatgtggttttttttgtttttgtttttaaagggaatggaatttttaaagtaggtaaaaaataagcatgcagataaagaaaaacaaaaaaaaaaacatgaaaggtggtagccggggagtggggctggggcactttctcttagatctgcccggatgtgtccagagcttccgaggactgtctgttcctggcttcttccttaacttgtcatcagagtcaggaccataacaaggggcagaggtgactctggtgtcctctctcgccttacccttagtgaccctccaggaagccagagaagttaccccaaatcgcaggacatgggaaggaagggccagagatgccaggcccatttaatcctcatttaactccaattttatattcaaggaacatcaaagccagggggcttgttacttgtcaaagttggacccagagtggagccaggcacaacacgcttatcgtttgtgtctttttttttttttttgagacgaagtcctgctgtgttgcccaggctgtagtgccgtggcgctcaccgcaacctccgcctcccgggttcaagcaatttacctgcctcagcctcccgagtagctgggactacaggcctgcgccaccatgcctagctaatttttgttattttcggtagagatggcgtttcactatgttggccaggctggtctcaaactcctgaccttgtgatctgcctgcctcagcctcccaaagagctggtgctgggattataggcatgagccactgcgcccggccttttttttttttttaatttgttttcttttttttttttctgagacaaggtctgactctgtcacccaggatggagtgcagtggcacaatcatggctaactgcagcctccacctcccggattcaagtgattctcccacctcagccttccaagtagctgtgactacatgtgtgcacccccacgcttgactaatttttttaatttttttgtggagatgaggtttcgccctgtcgcccagactggtcttgagctcctgggctcaagtgactggcccgcctcccaaagtactgggattacagatgtgagccaccacacctggccacacacttgtcatttctgacccccgagcccaccacattccactactcatgagaaagaggttcctgaacgctgcaggctaatttcagggacagcaggcaacttggccgcatgacaaagccaagtggtgaaataaacacattcttaattatgacctgtctcctcacccacatttttcattttccagaatggggacttgaaaactcaaaaggaagcagccagttacacatcagacctgttatctttcacctgttacctttcagctagaccgtagggtcagatgatttttgtttttttttctggtgaggggcagagcctcactgtgtcgctcaggctggagtgcagtggtgtgaccaacgctcactgcagccttaagcttctgggttcaagagctcctcctagctcagcttcctgagtagctgggactataggtgtggaccaccacacctagctaatgttaaaattttttgtagagacagggtcttactgtgtttcccaggctggtctcaaactcctgggctcaagtcattgtcctgccttggcctcccaaagtgctggcattataggtgtgagccaccgcacccagtccagatgattttcatgacccaaaattcagcatgaaaagcttgaaatgacaatgagcacagacacgggtaaagatccctggaatttcttgaaaccaagtcaggtggtttaggtgggggctggcctaaagcagattgccctgtctctcatgtcaggcggctagacacatttgtttagccccatgctgggctccacagggaatataggagggaaagaaactccaaccttcacctcctggagcgaactgggcactgggaagatgggtgagatggtattctgtgctcagagtgaaaagagttggaggaggctggcccagttgtggtgttgaggtgacatttggccttggttgccaggcaacatgtcacacgttgcttaaaactcattggtggcttctgctttctgtcagtcttggctaaaagttggaatcctgacccgagtctcccatgccatgtgtggtctgactgcgaccggtttttccagcctcttgttccttgctgccccatgatctcctggctccagccaccagtgccttctctcagttccccagatgcactgtgttccctcctacctcagggcctttgcacatgctggttctgccaccttttttccattttcagctggtttaactcctttttttttttttcccccctggaggcagtgtctccctctgtcacccaggctggtgtgcagtaagtttggcttggtgcaacctccacctcctggcttcaagcgacccttgtgcctcagcctacaggcatgtgcccccacgcctgactaatttttgtattttttgtagaggtgagatttcatcatgttggccaggctggtctcggattcctgacctcaggtgatccacttgccgcagcccctcaaagtgctgggattacaggtgtgtgagccacgatgcccagcactctttatttttttttattttttagagacagtctcactctgtcacccacgctggagtgcagtggcgcattctcggctcactgtaacctccgcctactgggttcaagccattctcttgcctcagcctcccgagtagctgagatgacatgtgcctaccaccatgcccagctaatttttgtattttagtaggcaaggggtttcgccatgttagtcaggctggtctcaaactcctgacctcaggtaatccacccgcctcggcctaccgacgtgctgggatcacaggcatgagccactgcacccagccttggtttaactctttaatgtcacttcctcgaagaaaacctcccccaatacctctctagactgcattaggtcaggttgtctgattttatactcacgtggaattgtgcaccgtttacagcccttctctgtgatgacgcatttatctgggatgattttatgggagcctatctcaccacgcgactggaagctccatgcatgagggcagagaccctgagtttgtctcttttttttgagacggagtctcactctgtcgcccaggctggagtgcagtggggcaatcttggctcactgcttctacctctgcctcctgggttcgaggaattctgcctcggccttccaattagctgggattacagatgccgaccacacacccggctaactttatatttttaatagaggcaggattttgccatattggccaggctggtctcgaagtctctacctcagttgatctgcccgcctcagcctcccaaaatgttgggattacaggtgtgagccacggcgcctggccctcgactttgtttactgctgactttgttgaatagctaaaggggaggggtgttctacgtaggagcaaaggcaggcagctgggtggcacagtgctggtgaagcccccgaccttgtggggctggggctggggctgggtgcgtgcatgtgctaagctgccttatctcctgtgatctccaggtcaagctttccgtgtactgggactacatgaaggccatcggactcttcatctccttcctcagcatcttccttttcatgtgtaaccatgtgtccgcgctggcttccaactattggctcagcctctggactgatgaccccatcgtcaacgggactcaggagcacacgaaagtccggctgagcgtctatggagccctgggcatttcacaaggttggtgccactgtctcccaccccgcctgatttgggcccctgttgtggctttgtctaattatagaaatggatccttagagtcctcagcgttttgtgggaccccaaaccaagccaaacccagaaaaatggtagctgtcagctagtagacactcagatatttgtagagtgggtgtttgagtgctttgttcatatgggccttggtggtagacgggaggagtgctccagtgtgcccattttacagatgaggacagttgagaacagaggcctctggaagcactgagggttgggaggacccccttgagcatgtttgctttgtcacagtgacagagcttccatgaggtctcatttgcggacttttgcctgctgagtgagggcggaaattggcttatactagtaattcccaattatgggcagtgttgtccctcggggatgtttgacaatatctggagatgcttttggttgtcaaaagattgagaaaccctgctgttggccaggcatggtggctcacacctgtaatcccacactttgggaggctgaagtcaaaggattgcttgaggccagatattcgagaccagcctgggcaacatagtgagaccctatttttagaaaaaatagataaataaaataaactacaggtcacgtggtggtatgcgcttgtggtctcagctacttgggcagctgaggtcacaagattgcttgagcccaggagtttgagcctacagttagacctgtgattgcaccactgccctccagcctgggtgacagagcaagaccctgtctcaaaaaataaacaaaaaaaaaaaaaaccctgctctatactgttctgtgtggtcctatgggagtcctcaaatgcagcagcgttgatattaacagctggcatttactgagcatttacttggtgcttggatttgttctaaacacttccacgtgttttaacttattttatccttgcagcagtcctgtgaggtaggagttaatatttccctcattttggagatacagaaattgaggcccagagaggttgagtcagttgccaaaagtcacacagctaatacatggcagcattggcattgaacaaggcagtctggctcaggagctcacgctgttatccactgtgctacgcagtatgtgagccatgtttgcaaatacacatgtatggtccatatgatatatacacagtaaatggatagtcttgacacatttgagtacttctgtatgccaggcacattgccaggtggggacttcacattccacagtgctccgaggtcagcgtcattgtcccattttacagatgaggaaactgagagattcagtgaccagtaggaggtcccatagctggtaagtggcagagatgggatttggcagcattggctccagagcctgttacttgagcccctgcctattgggtgtcttcccgattaaagaggccgagatggaagcctctctgttcctaggaagttgctgctctggaacacacagtgcgctcctgtggattgtttgagagaagcaccagtgtctcaggatctccaggaggtggctttgggaaaaccccagcggtagcagagcacacatggactccttgagtctctcaatccctcccctcccctctccttgccattaggggaaaggactgtggcctacaaattataattgagggaaggtagagaacagagagggtgtggtattacctgaactcacacagcaacaacgtctgttccagagctgtgctgtctggtgcggtagtcacaagacacaggtggctattttaatttcagctgttaaaattaaataaacgttgggcgcagtagctcacgcctgtaaccccaacactttgagaggccaaggcgggtggatcgcttaatccaggggttcaagaccagcctgggcagcatggcaaaaccctgtttctacaaaaaatacaaaaattcgctgggcgtggtggcgcatgtctgtaatccctgctactcaggaggctgaggtgggaggattgcttgagcccaggaggtcgaggctgcagtgagccgtgatcacagccctgtactccatcctgggtgacaggatgagagagaccccatctcaaaagaaaaataaaattaaagatttattcgattagactagacacgtttcaagtgctcagtagccatcatttcagaaaattatctcagcactgttctaaaacagcgatccctagcctttttggcaccagggactggtttcatggaaatggtgggtggtgatttcgggatgaaactgttccaccttagatcatcaggcattagttagattatcagaagaagcgcacagtctaggtcccttgcatgcacggttcacaatagggttcgcactgctaggaggatctaatgccaccactgagctcacaggaggcagagctcaggcgctgatgctcaggaggtgaccaccactcacctcctgctgtggggcctggttcctaaccggtcatgagctgctgccaatctgtggccccggggttggggacccctggtctagaagaatatggcatggggattaagagcaggctgtctggattaaaatcccagttctgcttctgctaggcacagtatactaagggcaaaggcgttcacctatctggacttcagttttcttatctgtaagttgggtagtaatagaagttattcagagtcatcataaaaatcagttacatgtaaaacccagcacagtgcttagcacataggaagtaccctctgaataatagctgccattatcatcatcattattattactatttttttttttttgagacggagtctcattctgtcgcccatgttggagtggagtggacgcagtcttggctcactgcaacctccacctcccggattcaagcaattcccttgcctcagcctcccgagtagctgggattacaggcgccaaccaccacgcctggctaatttttgtatttttaggagagacggagtttcactgtgttggccaggctggtctcgatctcctgacctcaagtgatccacccacctcggcctcccaaagtgctgggattacaggtgtgagccaccatgcctggttcatcattattattattattagaagttgggagtccaggcctgcctcgtccacatggccactcctccctgcagtgcctggtcagctccctctctgcattgtggagttttaactccgagtgtctgcagggatcgccgtgtttggctactccatggccgtgtccatcggggggatcttggcttcccgctgtctgcacgtggacctgctgcacagcatcctgcggtcacccatgagcttctttgagcggacccccagtgggaacctggtgaaccgcttctccaaggagctggacacagtggactccatgatcccggaggtcatcaagatgttcatgggctccctgttcaacgtcattggtgcctgcatcgttatcctgctggccacgcccatcgccgccatcatcatcccgccccttggcctcatctacttcttcgtccaggtaaggggtgaggtcttagtgttcgggacaagccctactgtgcattatataccagtgttacctaaagccttgttttatcttaccatgtccccagtgtggtgcttttgaagcatgtagatttgtttttgtcagtttcgaatacctaaattgtttttttgctcacaataacaaaatgcactttttttgtggaatgcagttttttcctaagttttacttttccacctgtcaattcaaaaaggaaacaaaacctatcactataaagacaacttcattattaaaatttctttttttttcttgagacagagtctcgctctgtcacccaggctggagtgcagtggcacaatcttggcttactgcaacctccacctcccagttcaagtgattcccctgcctcagcctcctgagttaacaggtgcgcaccaccacggccggctaatttttgtatttttagtagagacagggtttcaccagtgttggccaggctggtctcaaactcctgagctcaggtgatccacccacctcgacctccccaagtgttgggattacagatgtgagccactgcgtccagcctaaaatttcttcaagtataaaattctttagttcttaagcctcctgcaggaggcaggaactaaacaaaaaacatgactaatagcagcctaaataagatagacgttttctttttctctgtcataatagaaatttagaggtaggctgttcagggctggtatggcagcttcatgagtttaatatcccagatacctgcttttatttaaaaatttaaaaaatcttaccatatttatacaagcctttcattctttctttctttcttttttttttttaatttgacatggagtctcgctctgtcgcccaggctggagtgcagtggcgcgatctcggctcactgcaagctccacctctcgggttcacaccattctcctgcctcagcctcccgagtagctgggactacaggcgcccgccactacgcccggctaattttttttgtattttcagtagagacaaggtttcaccatgttagccaggatggtctcaatctcctgacctcgtgattcgcctgcctcagcctcccaaagtgctgggattacaggcgtgagccactgcgcccggcccctttcattcttaagttggcctcatggtccaaggtggctgctggagctccagccattatatctatatttcagtcagtgagatcaaggaagggaagtagggcaagggagcatatgggtgctgaatcagcactactcccttatctgcaggcacacattctaagactcccccaatggatgccttaaactgcagatagtattgaatcctacatatcctgtttttttctgtacatacatacctatgataaagtttaatttataaatttggcataatagattaatagcagtaatttataataataaaatagaacaattataacaatatgccagtatcactacttctccacattagaggcgttatttttattacttttttttttgagacagagtttagctgtgtccttcaggctggagtgcagtgatggaatctcggctcactgcaacatctgcctcccgggttcaagtgattctcttgcctcagcctcccaagtagctgggattacaggcatgcgccacacccagctagtttttgtatttttagtagagacgaggtttcaccatgttggccaggctagtctcaaactcctgacgtcaagtgatccgcccgcctcagcctgccaaagtgctgggattacaggcattgacccactgagcccagccaggggcattattgagtaaattcggattacttacccataagcactgcagtacaatggccgtcagtctgataaccgatatggctattaagtgactaaactgacagggagggtctgcagcatggacctgctggacaaagggatgattcacaccgcggatgggactgggggggatttcatcacactactcagaagggtgcacaatttaaaacttacacattatttttggaccacagttgaccatggataaccgaaaccatgtgtgttagtttgtcctcatactgctatgaagaaatacccaatactgggtaatttattaaggaaagaggtttaattgactcacagttccgcatggctgaggaggccatggcagaaggagaagcaaacatgtccttcttcacatggcagtaggaagaagaatgagagcaccacgaagtcggggagcccccttataaaaccatcagatcttgtgagaactaactcactatcatgagggttgggggaaactgcccccacgattcagttatctccacctggtccctcccatgacacatggggattaagggaactacaattcaagatgaaatttgggtggggacacagccaaaccatataaccacggaaagtgcaaccttggattagagggacacctgtacatctaattgtccagaacttagtcatgggaccacctctattcacaagggaccctggaaagtgccgtgttttagctgggcacattgcacttcccagcaaaaactttcagttgggcctaggcacggtggctcacgcctgtaaccctacccctttgggaggccgaggcgcgtgtatcacctgaagtcaggagttcgagagcagcctgaccaatatggtgaaaccccacctctactaaaaatacaaaaattagccaggtgtggtggcatgtgcctatagtcccagctgctctgaaggctgagacaggagaattgcttgaacctgggaggtggaggttgcagtgagccaagattgcatcactgcagtccagcctgggcaacagagtgatactctgtctaaaaaaaaacagagaagtttctgttgggaaaggagaaattgtgtaggcagtcagtcgtctctgctgcatcccttctgcagaaacggttatatgttctttgttctttgaacacatgtggtttcttaggatatcgcaggatagataatgttttcaattgacaggtggagcatcttgctaagtgggagagctgagagtgcaacctcaagtctgtccaattccaaaactgctgttaccgctaaaggattaaccgcagcacaattgccagtagggatgggttgtttagatgggagcattccagctgcaaagcaaaacaagagtaagaaaccatgaggctcaccatatctcaaaccacgctgcacagctgttcaggtggcatccagggggccttggttcaatcatgtggcccctgcgccccaccacactgtggcccaatgattgatgagaacgaacagtgatggaatcagagagagtaggtccagttcctggagtctcgttatatcctcttgaaattggtgccagctttttttttttttttttttttccctgcatttaccaaatatgttatctgtgttcatacgcaagctggaaaatttcctgaaagacccaaaaagaacaaaacaggccaaatgcagtgttgaaggcaacttaaatgtctgccaatagcaggaccttgggtacaccgtggagcaatgtggctttgagcagggataattagaagacgcagctgttggagcaccaaggatttttatttttcaacaacaaaggaaatgattttagcaaaggaccaagttctaggtgcactgtcgttatcaccgagatgaaatgcataatgtgtgtgggcaggactggaagggaggcagatacatgaaaacatcgtctttttaagggttgagattatagaatagttaattttttaatggcttttggctaaatttacatttatcctctcactaggcagtctcattcctaagtgtatattaaaaaaaaaaaaaaaaaaaaaagagcaaaggcagtgcttagaatgttctcagcatcttgattcataatcgcccaaactggaaacagctcaaatgtccattaacaggaccgtggagaaataaattgtgatataattatacaatttatggttgagtagtaaaaaggaatgaaatgctaatacacaacaatttgggtttatctcagagatgttatagtgatcaaaagaagccagacgaaaaagagtaggtactgtgagatttcatttatatgaagttcggtcgggtgcagtggctcatgcctttaatcccagccctttgggaggcctagacaggaggattgcttgggcccaggagttcgagaccagcctgagcaacatgggaaaacctggtctctacagaaaatacaaaaattagctgggtgtggtggcgtgaacctgtagtcccacctgcttgggaggctgagatggaagggtcacttgagcctcggaggcggaggttgcagtgagctgacattgtgccagtgcacttcagccttggtgacagggcgagttgtctgaaaaaaacatcagatcagcagggcaggtggatcacctgaggtcaggagtttgagaccagcctggccaacatggtgaaaccccatctctactaaaaatagaaaaattagccaggcacggtggtgggcgcctgcaattccagctacttaggaggctaaggcaggagaattgcttgaacctgggaggcagaggttgcaatgagccaagattgtgccactgcactccagccagggtgacagagcgagactgtcttaaaaaataaaataagatcattcctgaacaaatattcatctcaggttagatttttccagtaagtaaggttcagaggcagtggcaagtggaggaaagtgaacaggtaacacacttgagagcgatttgcatctggattgttcagaaagcaagctggtaagagaggaaggagatgtggtccagggtaagatggggcagatcacctgggccttcagccatgcagaggggtctggatttcatgggaggcggtgggaacagctggagaagaaattatatctgatccacattccaggaattggcagaacagctattctgagactgcgtggggttgtgcggtacctgggttcacttacatagcttctggggccccagaagactctccatctgtgggttgcaattaacgcccgtgccgccacccagaaagaagctgccaaccacagaggccttgtaaaagccacctgctgctattgatgctttttgttggactctgccccaaagcagcccagtacacctggcccagggcaggatgcagggaggccgagttcctagcaaccctttgttagttttcccagctctcctgtcgataagcaattgtaggcaccttgtggaatcaggaaccccgggctcaccagttccttttgcgtagatgagaaaaacctaggctaggagagcgcagtgtcctcacatggctggtgcagcctctgatccacagctccacaaagcttgcagaaggtggttggcttttgttctgaatctaacaagacttatcgggaggctcttggtgcctggcactggctgaatgcccaggttgggggaggcagagcagatgaagcatctgcccgcgagggtgggtggagctgcttgtgaaacgtatcatcgtagcccgggagctgggacactgaagcccggagaaggtgctcatggaggatgggaagggcttcccgaggaagtgacatctgtgctcccatctgctgggtgatgaggaatggcctggacgggatgggcatggtgggtggaggcaggcggcctgtgtgcagggaaggaaggggagagttacaggatgagatgagttgagggaagaagcatggttggcaactctaacagcgctgggaggccatcggaggggggtgacgagattgaccctatcctcatgggcatctcagctgggctgagtgtgctggaaccggccattgcatggacacagtcactcctgaggggatgtgatcaacaggcggaattctgtcacttaatgataacaatagtcaccagctaactgaatgcttactgttaggtcaaactatatgaaactgctaatacttatttcttatctacagaaacagctatttcctgtggttcaacctagtattaccaggcactgtgcttagtgacatcatgcatatctatatgatttatgaaataatgtgtccacgcaaatacacatcacatgtaagactgtaactcttacatgtcaccctcacaatgaccccgtgaagcaagctttgttttgtttcgtttgttttcttaataatattttatttttgtagagatggcattttgccatgtgcctgggctggtctcagactcctggcctcaagtgatctcccgcctctgcctcctgaagtgcgggtattacaagcatgagccaccccacctggccgagcaagccttgttgttcccattttacagataaggaaactgaggcttagagaagtaaagtgttagtcgtgtttatattgccagtcagtagttgagtcaggatttgaactgaggtctcgttgacctcaaagcctatgctgaaaaccacactgctggttccagaaaaccctagaggtgaaaggcttcagagaggcagtacagggtagaggttagcactttgcagcccagatggcctgggtttgaatcccagttctgccccttgctagccatgtgaccttggggaggagattaactagcttctttgtgccttagtctacccatcacatataggaatgagcacctcaggttttttgtgaggattgaatgaactgatgtttgtaaaactgcttagaacgatgcctggggctgtgggctttgtataagcgtgagctattattgtcactgtccttgtcattggtggtgctattcctgtggttcaccaggtgagtgggcacccctgtgagggcagcccggctctaacattttgcctcctggaggtatcggttacgtctagatgttctccagcacagccctgccctgggaggatggcaggagggaaccttcatcaactccccgcgtctgttctctaccccagaggttctacgtggcttcctcccggcagctgaagcgcctcgagtcggtcagccgctccccggtctattcccatttcaacgagaccttgctgggggtcagcgtcattcgagccttcgaggagcaggagcgcttcatccaccagagtgacctgaaggtggacgagaaccagaaggcctattaccccagcatcgtggccaacaggtgggcatggtgggcctgcaggagcgggtggaggaggccgccttagcaccttgtctctttgcctcgatcttttcctcgcaccttgagctgggtataaagccaaaccccggccttgcagaaaggatggagaggcttgatgagcgcggaggacagatgaatcattaagagcagacagcggcactgtagacatgcagtgcccgcggcatttaagtgcagggacacagctcttctggagtcagaaagccctgcaagtgcttcccgttaactgtcatcctagtgatgcaagactgccagcgaccgactctgctattgagtatcttcataccgctgttcccgtctgggggtgatcatgcacccctgggtgatgtgtgtcagaagcaatttactaatactaagctaaaccatatgagattgtcatcttgtgggccagatgtcatggctcacgcctgtaatcccagtactttgggaggctgaggcaggaggatccattagattccaggccagcctgggcaacatagcaagacccccatctctcttaaaaaaaaaaaaaaaaaaaaaaagtagcccatcatggtggtgtgtgcctgtagtcctagcttctcgagaggctgaggctggaggatcgtttcagcccaggagttcaaagttgcattgagctatgattacaccactgcactccagcctgggtgacagagtgagaccctgtctctggaaaaacaaaaaaaggagatgggggtgggagattgacatcttgtggatcacagataatagcatcaatccaaaagaggcagaagtttgctaattatttgctgaatttagagaagtgtccctctcacccatttgcatccttatagacttttctgaaaaagtgacagcaccccagaggtgtcccataaccattagcccgtcttacacactctaatcccatagcgtaagtctgggtgggctaaccctgaatgattacagaccttgacttcccttcagaatttttagggagtttgtcacaatctggctgtgtctgtcggagtagtgaggatcagtcacttggttcataagggctgcaatggagaaaagatcaacaccccatcttcctagaatgctttatattttagaacattaaaataatagttctagtgctatatgatatcatacgaagcctagctttaaacaaataagatggccaggcgcggtggctcacatctgtaatcccagcactttgggatgccaaagtgggtggatcacctgaggtcaggagttcaagaccagcctggtcaacatggcaaaatcccatctatattaaaaatacaaaaaaattagccgggcatgatggtgggtgcctgtacttgggaggctgaggcaggagaatcacttgaacccaagaggcagaggttgcagtgagccaagaccgcaccattgcactccagcctgggcaacgagagcgaaactctatctgaagaaataatagaagagaagagaagaataaaataaaaagtaaaataaaatagttctgatggtacatgataccatactaaacctagctttaaacaaataagatgaccaggcacattggttgacacctgtaatctcagcactttgggtggccaaggcaggcgggtcacttgagcccagcagttcgagaccagcctgggcactctagggagaccctgtctctaaaaacaaaacaaaaaaccaaaaatttgccaggtgtggtggcatgggcctgtagtcgcagctactcaggctgaggcaggaggatcactggaacttggaaggttgaggcggcagtgagctgtgatcatgtcatccacactccagcctggatggcagagtaagaccccatctcaaaaaaacaaaatgacagaaaacatgatttctgtttctattttaaagggtaaaatagtatattttaacactttgaaatgaagagtctgggcttgggaacgttacaatgatgtttactcgtactagttacgcactcccctcccagatctgtctcgtaacaagagactgttattttctacttgtttttagccaaaaggccgagaaacgatggttattttaaatccctagtgtctcttacagttgatgtcttcttagtatttaggaatttccaggacatctttttgttgttgttaatgcactgtgtgtgtgtgtgtgtgtgtgtgtgtgtatgtgtgtgtgtgattataggagtgacccactacgcccggctgtgtgtgtgtgtgtgtgtgtgtgtgtgggtgtgtgtgtatgtgtgtgtgtgtgattataggagtgacccactacgcccggcctatgtgtatgtattttaaaggcttcaatgagaaaaaagttggttcttaaaaaggcaagcttcagattccagggaagattgcctctggagagctctgttttaatccatgggtttgccagattaatgaggatttactggcctcgtgccttcggccctccctaccctgcgcccattgtgcatgttttgaaaaagcagtgccaggaaggactctctctggaattactgcggagttacttgagttagcaaagaatccccttcctcccccaagagctgtaagccaagtctctgtagagctgactccatgcctgtttgtctgcctgtgtgtcttggcgcaggtggctggccgtgcggctggagtgtgtgggcaactgcatcgttctgtttgctgccctgtttgcggtgatctccaggcacagcctcagtgctggcttggtgggcctctcagtgtcttactcattgcaggtaagaggggatgctcttggctggattattaaagtctgttaatgggggagccagttgtccttggctttggattccagctccaacaggaatgggggagaggaacttgagaggtacggagtttgaggagcaggtacagtgccacagtgcctggtgaccaactagagcaggagacggatttgacatgtggccaggattttccccatcagtcacacagattccttagtggcccaagaggatacttccaggtacgaggggaatgcttttaaagctatgaatttccctctaagaactgctttagctgcatctcacaaatgatgatacattgtgttttcatattgtcacctggctaaaaatattttccagtttcttattatgtggcccatgagttattttggaaatgtgtgtgcttaggagatggcaatgtggcaggcctgggtgatggctatacctggggttgctaatttcggtacctttcttacctgaatgtttcataactcataaccttttatttttatttatttattttttttggagacggaatctcactctgtcacccaggctggaatgcagtggtgggatctcggctcactgcaacctctgcctcctgggttcaagtgattcttctgcctcagcctcccaaatagctgggtttacaggtgtgcgtcaccatgcctggctaatttttatatttttagtagtgactgatggggtttcgccacatcggccaggctggtctcaaacccctgacctcaggtgatctgaccgcctcagcctcccataattcatacttgttgaaaataatttgtttcctattatctcagtggaaaaaaaaaaaaaaagaaaaaggaaagtcaagtacgcccgcttactctagaaatgccacgtgactcttccactcacaggtcaccacgtacttgaactggctggttcggatgtcatctgaaatggaaaccaacatcgtggccgtggagaggctcaaggagtattcagagactgagaaggaggtaggcaagggcccctggctggacctcttggtctttggtgtagctttaccccaaggagatctctggaccctatcctgtgcacctctgcctctgagctggatacctcaccaggtagaagtgcatcttaacgcttgtccagtctttttgcagcacttatttagagcccggttttagggtgaaaatagtttaccggctttacccaagatctggggtatccatatacgagactgtgggatgctgtcagggcattcagaaggtattcacattgtgaagaagtttccccctctatttctctttcataacttctgatggtatcacagagaaagtcttagtctggggctagcaggtctttaacactttagcaattgagatgatctcccttcaacagacagataaacagcagccctcacacttggagtcttcaacaggacggcttctgtctatcagaaataaccttctgttatttgttatgaatttggtttttttgtgtgtgtgatggagtctcactgtcacccaggctggagtgcagtggcacaatctcggctcactgcaacctcctcctcccaggttcaagtaattctcctgcctcagcctcccaaatagttgggattacaggtgcctgtcatcatgcctggctaatttttgtatttttagtagagatgggggtttcactaagttggccagtctggtctcaaactcttgacctcaggtgatccgcctgcctcagcctcccaaagtgctgggattacaggcgtgagccactgcgcctggcctgttatgtatttgtataggggactcctgttacggaaaataatactacttttccttttgtgattgtaataaattttcctcttaagtaagttgagaaattaagtctaagtgacttgattaagcatattaaaacaacaagagaatgagtacatgcatactacacgaatgatgtagctgggaactgaccaaagtttgggaaaccctgcagttattgaaccccagtcccctttttatagatggagaaaaagggaacctggggagggacaacagctgatccaaggtcccacgtggcttggtagaacagctgggactaggacctgtgcctccagtctttgatgttgcgttgcccttaataactgccttcttaggccctgaacagcagcacaagtaggaacagcagtgataatagataatcacaataatgcctggcgacacccccaccctacattaatgataacagggacacacatagtgccttgtagaatgtcaggcccagacttaaacgtttaatatagagtaatgcactcagtctttaccccgctctatgactgatttttgagacacggtctcactcttgcccgggttggagtgtagtgcgatctcattcgctgcctcccaggctcaggtgattctcctacctctgcctcctgagtgtctgggaccacgggcatatgccatcacaccggactgatttttgtatttttagtagagacgggattttgcccagactcatcttgatctcctgagctctagtgatctgcctgccttggcctcccaaagtgctgggattacaagcgggagccaccatgcccagcccagccctataatttagatgctactattacccccattttacaggtgaggaaactgagacaaaaagctgaagttacttgcccaagatcacatggctggtaaatggcagacctaggcgttgagcctgtgcctcctcagagaccctatccagtgccatgggagtcatgctacccggcctcctgaggagagatgccccttgggagtgagaccaaggcctctgtaaggtctgtcctcctgaggaattcacagaggtgacctcggcccactcctttaacattctgactgggtgaaccaggtcccatgtcacgggtgagcattgtaagaatggcgtgagtgcccccgtgaggaaccaagggtgtattacaccggcggcttccaacttgacactgaatttaattcacttacaaggtatttcattaggttttttttttttttttttttagatggaatttggctttttttttgcccaggctggaatgcagtggcacgatctcagctcactgcaacctccacctcctgggttcaagtgattctcctgcctcagcctcccaattagctgggattacaagtacccaccaccccgcccagctaacttatttcattagtttttataatagcctcattgacatgtgaatttcacatgccatggaattcacccagttaaagcgttcagttagattgaattcagtttttttttgtttgtttgagacttaagtctcgctccagcctggagtgcagtggcatgatctcagctcactgcaacctccttctcctgggttcaagcgattcccagcctcctgagtagctgggattacaggcgatttttgtatttttagtagagaagggatttcaccatgttggcccggctggtctcgaactcctgacctcgtgatccacccgcctcagcctcccaaagtgctgggatcacaggtgtgagccaccacacccggcctgagttcagtttttaaaagcattttacttttgactgacttttatatttttagaaggatcgtgtttgacaaacccaagagaaagtaattgtcctcattagtcctaccactattctgtatttgcatgtatttttatatatagatagaaagttccacatacttctctccattccgctcactgtgttgttatagcatctccccttcaattatgtacataaattataaaatagagatacacttgttgttttaaaaaagaaaaaatcaatacagggctggacacagtggcccacgcctgcaatcccagcactttgagaggccaaggtgggtggatcacttgaagccaggagttcgagaccagcctggccaacggtgaatcccgtctctactaaaaatacaaaaattagttggcatggtggcaggtgcctataattccagctacttgggaggctgaggtgggaggatcgctggaacccgggaggtggaggttgcagtgagctgaagaaacatcactgcactccagcctgggtgacagagtgagactctgtctcgaaaaacaaaaaaacaagtttatggtggagaaagacagtttgttcctgttcgccccgttcctctcctctccagagagaggccccattagcattcgggtgaatttcccccaaaactttcccgtgtggattcccacataccccaacacttttgtttgcttgtttctttttcttttaacgtaagtggaatctacctgttatcctgtgaaaccttttctttaaccatgaggcacctttgcatctgtgtatagtaacagtcactgcctctaagggctgctgtgaggctcagatgagatcatgggtctcaagtgctgagcagagcaacttgccttagttgcattgtaagcgctcaataataacatttattttttggccaggcgcggtggctcacgcctgtaatcccagcactttgggaggccaaggcagatggatcacttgagcccaggagtttgagacgatcctgggcaacatggtgagacatcgtctctacaaaacaaaaaataatactttttgttgttggcggtggtggtggggtttttttttgtttttttttttttgagacagaggagtcttgctgtgtcacccagactggagtgtagtggttttatcttggctcactgcaacctctgcctcccagattctagtgatcgtcgtgtctcaacctcccaagtagctgagattacaggctcccaccatcaggcccagctaatttttgtatttttagtagagccaggtttcaccatgttggtcaggctggtctcaaactcctgacctcaagtgttctgcccacctcggcctccctaagtgctgggattacaggtgtgagccactgcgccggcaacgctgtgattttatagcacgtccacaaaagggctgcatgtcttgcctaaaagttgcccggcgttttcttgttatgtgccgtctgcagtgcccctgagcttggccatgtgctctgcagcctggttcagcacctgtgtgtgccctggacggggaggtgcattccccgaggctaaaaccagtgaacctggcccaggccatatccagctgtgggcctcaggaaatgctgaactgaactacttttcaaaaggagggttgtgtgtccctgggcaagttaccgcccctctctgtgtctcagtctccttgtgtgtaaactggggataatgaaaggaccctcccacatggggttgctgtgaggattggatgagacactgcgatacagatgctgcttttatccttgccttcctgccggggtgggcagccagggtaactcacttttattgtcgtgtctgtccagagaagaccactcatttcattgactccatttataaatatttatttaaatttttttttatcaaaaagtaagttttattggcatctaaaaacaaaattcacccaacactgaaacatacttcaatatttatgttattgttttcttgtttcttttttactcactgcagtgtgaggaacaaatcacatttactttggagaaacagagaccatagtgtagattttacaaaatcactttttaaactctctgtattgcgctcctcaaatacctagagccagtctgtgcataacatggcacactgttgtctaaaccgtaaaattttgcatcagcctaaagatatggataagatatacctccacttgctcttttgaaatacatctattaccttatccagcctaatgatagttacctaaaaaattctttgttccgtaggaagtctctgacaagctgttattcatttccttgacgttaaaagaatctgggggcaacatttatattttatcagaaaaactttttaaaagtttacctatcatgttcatattgagaacaatgtctgtggcgggcatggtggctcacgcctgtaatcccagcactttgggaggtagaggtgggcggatcatgaggtcaggagttagagaccagcctggccaacatggtgaaaccacatctctactaaaaatacaaaaattagctgggtgtggtggcgggtgtctgtaatcccagctactcaggaggctgaggcaggagagtcgcttgaacctgggaggcaggggttgcagtgagctgagatcatgccattgcactccagcctgggcgacagagtgagactccgtctcaaaaaaaaaagaacaatgtctatacaaatcagttgtacaattattttaaaagaatggtgagcatgaacgtcacgttaattctggcagacaaaaatgaacaactatggtccattgagccattatctgttacacagagatgacagctttacagaaggtatctctgacctactgagggatgatcatgtcctctcagtttctgtgccttctaccactagttcactttctatatcagcagctgtgtcactcttcttgtttatgttcataaatgtgtgttgaacacctactatgtgctctgagccctgggatacagcagtgaacaattagagcctgtcctcattgagtggatggtgcagtgggtgtgggagacagaatacactcaagcatgcgagccccaagagggctggggacaggcagtgccctgaaggagaaggcagtgcgggaggggacagagggacacagggctgagagggtgctctgtatcgaccagagatccacaggatgcaagggggtcatttggggaataacattccaggaagggcaaccccccagtgctgaggcctgggaggccaccttgggcagcagagtgagtgagaggggaggtcaggggagtcacagctttaccagatggactggaaattccttactctctcccttcactgcgatcgaaggcgccctggcaaatccaggagacagctccgcccagcagctggccccaggtgggccgagtggaattccggaactactgcctgcgctaccgagaggacctggacttcgttctcaggcacatcaatgtcacgatcaatgggggagaaaaggtgggtacacatcgccccattccctcacccattcccagtcgggcacagggtgccatcgggcaggtgaacctagctgcagcgtctccccagtcactcacggctccacacctttgcttgaatggctttttggggggctgggagtggactgtggcagtaaaagctgttcagagcgcatacagcttgcagaagtgaaggcttttaggtgaactgacagcctgaagaccaaatgagccccacagatttgttttggaagattttttgttgttgttgttgagagagggtcttgctctgttacccaggctagagtgcagtggtgtgatctcagcccactgcagcggcagcctcccaagtggggggactacacatggttgggagtgcaggtgtgtgccactgcacctggctaatttttgtattttttgtagagatgggggtcctactatgttgtccaggctgatctggaactcttgagctcaaccggtctgcccgcctcagcttcccaaagtgctgggattacaggaatcagccaccattcctggcccctggaagaagttctttttttgttttttggttggttgttttttttttttttttttttttttttttgagatggagtcttactctgttgccaaggccagagtgcaggggcccgatctcagctcactgcaacttctgcctcctgggttcaagtgattctcctgccttagcctcccgagtagctgggactacaggcatgcgccaccatgcctagctaatttttgtgttattagtagagatggggttttgccatgttggccagggtggtcttgaactcctgacctcaactgatccacccgcctcagcctccccaagtgctgggattacaggtgtgagccactgcacctggcctggaagaaatttgaataagttgcaaatactgaaaaatctggaagacttaatataaaaatttattttctgctttttttggaagatcagaacatctggcaacatcaggtcaatcctcccccgcctggctctttctagtcaacctgtgagcctcctggttcaccccagtccctccctgtcccattcattgcctagttggcccctccaaaacattagaatttgtgatctctagaataaggtgtcaccatcccttctagggggatggctcaagggaagtgagaaattgtcagaattttggaaccttctcttggttccgagctgttcttggaagaggttccttgacctgagtgatacccttagactttcctctggaattggtctgacagtcttcctggccatttgctgggggacaaggctgctttcacctctgaacatatggacttattgaactgttcctacgtacctcccacagagctcagaacattctgttcccagcagataatttctctctgagttacagagaagagcagagtgggtgatgttcttgctgtctttttttgtttttgtttttgtttttgtttttgttttgttttgttttgttttgagacagcctctcactctgtcacccaggctggagtccagtggtgctatttcggctcactgcaacctccgtcccctgggttcaagtgattctcctgcctccgtctcccgagtatctgggactacaggtgcatgccaccacgcccagctaatttttgtagttttagtagagatggggttttaccatgttggccaggctggtctcgaactcctgaccttctctgatccaccttcctcggcctcccaaagtgctgggactacaggcatgagccaccgtgccccagcccttgttgagtctttatggcttatctcatgtcatgagaatttttgcacgcatgctgctctgtgacacccctgtaggagggaagaaggagcccacttctcaagagccaggcaggaaggggagaactggaggtcaggaacatcatcctttggccattagctagagaacctagttccttcaagagaggatgcatggagaccaggtcatagcaaagggccggaagatctgcctgaatctttcagatatttcaacaactcatgatgggaaactcaccatcaaaggtgtgaaaaacagtggggaaatgaggaaatgcctgattattacttaatagtttcttgagtctaaacaaatagggctttgttggaaattccttctgcctcttctatatctcttttgaggtctctagtaacttataaaaagccgagtcattccttttgggagcctggcaaagggaagagagtccttcttgaccttcggccgaaacacccttaaaggagtgtctctgggcagcgcgcaagggagagggctgtcgagttgggttgaccagatgactgatgcctgaggtggggccgagatgagggcactttggggcagggacaagtccggatgccagcattcccaccacacctgggcccttctgtcctgcaggtcggcatcgtggggcggacgggagctgggaagtcgtccctgaccctgggcttatttcggatcaacgagtctgccgaaggagagatcatcatcgatggcatcaacatcgccaagatcggcctgcacgacctccgcttcaagatcaccatcatcccccaggtggggtctgggtgtggcccagggggtgagccagagctggcaagccctatgattgcactgacagtggtgtatgtatatttttggggcaaacatacatttggccctacttcatcgttctttttttttttttttttttttttcctgaaacagggtctcgctctgttgcccagagtggagtgcgctggcgcaatctcagctcactgcaacctccgtctcccaggctcaagcgattctcccaccccagcctcctgagtagctgggactacaggcacatgccaccacacccagctaaatttgttttgtacttttttgtggagatggggttccactgtgttgcccaggctgcccttgaactcctgggctcaagcaatccacccaccttggcctccaaaagtgctgggattacaggcatgaggcaccgtggctggccttcattgtttttattgaagttaggctgtgctgctgcttccctgaatttcctcttagtatatgattaacaacgtgggaattaactgactatcagtcccgacttcctgtccccgggaggggtagtttcagagcatctagaaaaatccaaaaagacaccgtcttctctctctgctgccagagtcagactgagcatctctaacccttccaagagctagacaagaaataagactttttaattttcgattcacggggtgcacctgcaggcttgttacgtgggtatattgtgtgatgctgatgcttcggcttctatggatctcatcacccaactattgaacagagtacccgagagagagtagtttctcaaccattaccctcctccatctgtccccacttatggaggctccagtgtctatcatttccatctttacaaccatgagtacccagagtttagctccctcttacaagtgagaacacacagtatttggtgagaaataaggattttctttttctttctcttttcttttttttctttttttaactgagacggagtctcactctgtcacccagtgcagtggcacgatctcagcttactgcaacctgcacctcctgggttcaagcgattcttctgcctcagcttcccaagtagctgggattataggcacgcaccaccatgcgtggctagtttttgtatttttagtagaaacggggtttcaccatgttacccaggctggtctcaaactcctgacctcgagtgatctgcctgcctcggcctcccatagtgctgggattacaggggtgagccaacatgcttggctgaaataaggattttctagaccaatccccgcaggtggattccttaatatgttgccttttagtgtaatcttccctaaagtgtcttagaagattctcttctgtggttggatgacgggagaatccatgggactttactgttaggaatcacctgtgctgcgtctcatttctggaggttctcaacccacttgcatattgaaggctccaggaagttgtatggaaaggaaatctgttgtattctgccaaactcagactttccagacttttttttttttccattattaaggcaattttttttttggagatagagtcttgctctggagtgcagtggcacaatcttggctcactgcaacttccgtctcccgggttcaagtgattctcctgcctcagtctcctgagtagctgggactacaggtatgcaccaccatgcccagctaatttttgtatttttactagagacagggtgttgccatgttggccaggctggtctcgaactcctgaccttaagtgatccactcgcctcggcctgccaaagtgctgggattacaggcgtgaaccaccgtacctggcctttttctccattattaacatctccagaaatagtgattccaaggagctctgataccccaccttcaacagtcctggccagaagtccttaggtcgcctccatccatgtcagcgtgacacaggtgtcacatgccgtccactctcttctctctgaacaggaccctgttttgttttcgggttccctccgaatgaacctggacccattcagccagtactcggatgaagaagtctggacgtccctggagctggcccacctgaaggacttcgtgtcagcccttcctgacaagctagaccatgaatgtgcagaaggcggggagaacctcaggtaggcgggggtgaacaaggagacaccgggtaaggtgtcctaggcgccatctcggtaggggtgtttgaagattctgtccagatctgtgtcacctggatttgagtcccagatgaccatttgtcccttcacctcttggagcctcagtttctgtatctgtaaaacgggtctcaatccaggctctttgtaccatgaggtagaataaccaggatgaccagtacatttccttttatacacaccagctccattcagttgatagtggctgtcagttgttaagctatggaaagtcttctgtaccagttggtcactagcactgctctgagcccccaggtccccatgcactaccccagctgtcttggtctctaccaggatcctggagctctgtccatgacccagcaactaaagcattaatgcctggcacaccagcggaacctctggggtcctgctttggtggtgtttgttagtgcctggttctggttctgttatccgtctccatgacaaccaaccataaagcctcaggcatgttcaaccataaagcaacgatcattgctgccatacgagggcagtcagccaggtggctctgctgatctcggctgggctcacatgcatgtctgggagtcagctggctgttggctgatctcggggtcagctggcttttggcctcaggtggggcaagaagggtatgttccgtgcatccctcattctccagcagaccagcttgggcatgttgtcatggcgatggcaggggcacaagagcgtgcaagcccctattgcatctaacagtattcttttggctgtccttacttttgctggtgtcccattggccaaagcaaggaacatgtctgattccagagccacctctcatggccccacagttggataagggatgcatgggtatgaggccttttttttttttttttttttttttttgagacggagggtctcactctatcacccaggctggagtgcagtggcgcaatctcatctgcaacctccgcccccaggctcaagcaattgttctgcctctgcctctctgcctcctaagtagctgggatgacaggtgcctgtcaccatgcccagttaaattttgcatttttagtagagatggggtatcaccacattgtccaggctagtctcaaactcctggcctcaagcgatccacccgccttagcctcacaaggtgctgggatactaggtgtgagccactgtgcccggctcttattttttttttattttatttttttttaagagacagtgtctcactctgttgcctaggctggagtacagtggattgatctcggactctaactcctggactcaagcaatcctgcctcagcctcccagtaactgggactacaagagcatgccaccacacccagctaatttgtttatttttgtttttggagagatgggggtcttgcttttttgcccaggctggtctcaaattcctggcttcaagctatcctcccacctcagcctcccaaagtgctcagattgtaggtgtgagctgctgttttgagaatgattctgaacctgcatcttgctgaataggagatgtgctctgattgattagtgatgtctgctgcagacacagatgttgggagtggacatgctttcctggtcaagcaacatagagtgtctcctttcgcttctcccagcctgggcctaggttcagggtcaggggtggtttgacccaacactatctcctggtttttttcttccggtcaagtgtcgggcagcgccagcttgtgtgcctagcccgggccctgctgaggaagacgaagatccttgtgttggatgaggccacggcagccgtggacctggaaacggacgacctcatccagtccaccatccggacacagttcgaggactgcaccgtcctcaccatcgcccaccggctcaacaccatcatggactacacaaggtgatgccactggcacaatggcctctaggctttgggagtttgccttactcactggctcactcattaattcattaattcattcaacactgtccttatccctagtgacagccccagtgggtggatcctctcttcatcctggatggtaccagctatttctttttttttttttttttttgagacagagtctcgctccatctctggagtgcagtggtgtgatctcggctcactgcaacctctgcctctggggttcaagcatttctcctgcctcagactcccgaatagctggaactacaggaatgtgccaccacgcccatctaacttttatatttttagtagtgacagggttttgccatgttggccaggctggtctcgaactcctgacctcaggcgatctgcccgcctccgcctcccaaattgctgggattacaggcatgaaccgctgtgcccagtggtaccaggtatttctaatatcatctagtcattcattcacgtcagcgcacctgcggtgttcccagacactggggactctgtaggctgctgtcagacaaagtccctgcctccaggaccaagtagcttattagatggaggagacaaaaaatatacagagcaataaaccaacaggattccagagggcagcaggtgctgggaaggacgcttgccaaggagacgggatagcgagtgctgggcagggccactgtttccattgaacactgcaggcccagtgcgtggggcccacaaaaaggttttattttttttaaaaaatcagaagcaggccaggtgcggtggctcacggctgtaatcccagcactttgggaggccgaggcaggcagatcacctgaggtcgatagtttgagaccagcttggccaacacggtgagaccctgtcaccattaaaaatacaaaaagtagccaagtgtggtggtgcgtgcccataatcccaggtacttgggaggctgaggaaggagaattgcttgaacctgggaggtggaggttgcagtgagctgagattgtgccactgcagtccagcctgggcaacagagtgagactccatctcaaaaaaaaaaaaaaaaaaaaaaaaagaatataatccaacctggattttatttatactaacacagtcataaaatagaatttctagcattttgtgtggagaaagccacctccgtaggcatcagtgccggggaccacaaaagtcagaatgctgccatagtgccagggtcctggggggttttgagttttgtgtgggtcatctctgaagaggtgacattttagctgagacctgaacaatgaaaaggagtcagccttgagaagatctgggacagcgatctgcaaccttgttcttaagggccggggtagtttcagctttgtgggccacatggcctctcagccacttgactccagtgttgccgtgtgaaagcagatcatagatagtgcacgaatgaatgagcatggctatgttccaataaaactttattcataaaaacaggcaaggggtcagatttggcctgcaggccacagtttgccaaccttggatctaaaggaagaacattctaggcagccggtacagccgaatgtaaaaatgaatgcgcttaatgaatttgaaggctagcatgaggaggccatgtacctagaggttggaattgagtggacaggggcaggagattaggccagaaaggtaggcaggggctggatcttagagcaccatgtaaccacggtgagaagcttggaacttactctaagagccctataaagccattggaaggttttaagcagggaagtgacatgagtttctattttattttatatatttttgagacagggtctcaccctgtcgcccaggctggagtgcagtggtgggatcacagctcactgcggcctcaagtgatcctcctgcctcagccttccaaagtgctgggattataggcgtgagtctctgcacccagctgacatgatgtttctagttcactgagtaccacctactaagtggcagatgctgagttggtgcttttgaaatataggacatagaaatgaggacagaagtgggcagtgtcaaatcttacaggacctaaaatattaggggtcagccaactatggcccacaggccacagatctggccccctgcgtgtttttatgaataaagttttattggcacgcagccacatctgttcattttcctgttgtctctggcagctttcacactataaatacagcagagatgcgtagttgtaacagaaagcatatggcctgcagagcctcaagtatttactatctggcctttttcagaaaaatgttgccaatcgttattgtagactgtggtaagatctttttattttactctgaatgtaatggaacagtgaatgtgaacagtcaacactgttaataccattcacaccatgattgatgtggggtagatattaaggagctggcctcatgggaatctgacattgactagaaatagggattgagggtgagcaaccagctggaaggtactgcaccagtcctagcaaaaagtgttaggggcctgacccgaagcagtgacttgcccaggtcagttgtcccaggggcacgaggtgctcacccctccccttcccctcatgtctgtatcccctctccctcagggtgatcgtcttggacaaaggagaaatccaggagtacggcgccccatcggacctcctgcagcagagaggtcttttctacagcatggccaaagacgccggcttggtgtgagccccagagctggcatatctggtcagaactgcagggcctatatgccagcgcccagggaggagtcagtacccctggtaaaccaagcctcccacactgaaaccaaaacataaaaaccaaacccagacaaccaaaacatattcaaagcagcagccaccgccatccggtcccctgcctggaactggctgtgaagacccaggagagacagagatgcgaaccacccaaaacacgcacaccctgcccctggtgccctgagacagacacacagcctcacgcccccaggaatgcaagtggtttcctggtgcttcccacggaggagttttggcagccagacttctggaggaattggttgtatagaagatcctagtgaccaaattcagcctactgcctcggatctctccagccgaagtctgtggactgcaagtctttgagatgcttctggctcccatcacctctaacatccttgtctgggtctaccaggaacgcttcatttccttggggctgcagttttgtggttgaggggcctggagaaaatcattttctccccttggcagtgtcccagggccctggatggtcctcttaccaacatctggtcttccaggcactcaaaagctgggaaccagcatctcagcgccagctctaccagttctcgttttgggccagaggcagcctctgcactcccacgcctgtcctcctggaagggacctggttggactaacggctaacctggacctggaactgtagggccaggggattgtctcagggccgacgttccacctggggcttccctccccacccacccccactccaggctttcccttttttcttttgttcaacattgtaagaacaatcaatgctgttattactgttcccaccatgattgatgtggggtaaatattaaggagatggcctcatgggaatttgaccttgactagaaatagagactgagagtgagcaaccagctggaaggtactatgccagtcctagcagaaaaatgtgttaggggcctggcccaaagcagtgttggttgcttacagtgttgattgattttgttcttttttcttaccacctcttttctttccctctcatggtacctgctcatggttatgaagctttcaaagtaaagaacacgaaatacctcccaagtattaccagtgggtaccaaaaaaatgtccccttgagtcttttccttgtttttagatgttaattctctcccttggcatccggttagccccccagggggggcagcattgtggagaacttgatatttagttactgatgctcttccaggacacgaaaagaacccatctttgaatatcaatgatttttttttttttaagtactgttccggggagaaaaacagtctcaaaacttgaacttcttgggaagagaagtgttgggctgagaagtaacattcccaggaaatagtgagaagctcgccctgtgtttgaaaccgtgttggtctctgtgttcctggaagaaaacagggaagcagcatcttttaaagcctgttctctaaggtgtctcgttagagcccaaagtggaatccggaaggcagccagagctgaggctgccccaagactcagacttgctaagaattacgccgccgacttcaaacccagagagcatctttcttttaggcgaaaacgcatatatttattttttgtaagttataccattctttcacattagataatctatagttttggtgggatccttttgtatatgacttacactggaaatgcgaacatttgcagtaaaaaaatatatataatcatatattttatttctttctaaagaatggttccctttcctttggggccttcggtcgagggttccagccatgtcctctgcagggtcaggatgtggcatcttcctgtttctgttctttccttttgacaacaagtcgcctctagtgggagctgttgccagaaagggcaagttgtagagatcactagtcagatggggtttagtgggaaggcgggacagccgcaaggtggacggagcccaggttttggggttggacagaccctggcttgagtcctgctcttgtcatttgctgttcttgtgaccctggggaagtcactcagcctctgtgcctcacttgctttgtctgtaaaatgaggctgatcgtacttaccctgtgagcagtgatgtgtgcggtactcgtagcctcggtcaggttctaagacacaggcgaggcagaaatcacatgtggccagaacgatccttgaaaatcctgccctccccctgcccttttttttttttttttttttttttgtgctagaggcacggtctcactctgttgcccaggctggtgtgcagtggcacgatcatagctcactgcagcctcaaactcctgggcttacgcaatcttcctgcctcagcctcctgggtagctgggactacaggcatgtgcccagctaatttttaaaaatttttatagagtcagggtcttgctatgttacccaggttgttcttaaactcctgggctctggggatcctcctgcctgagcctcccaaagtgctggggttcaggcacctggcctgaaaatccctttatgttagtccagagaggcgaggctgcgctgcagtaacaaattcgccgtaaaatcttcggaaatgatcgcaaggctttatttcttgctcacgcagttcttggtgagggtcagctgcctctccagggtaggtgacttccctgtgacaagtgatccaggctgtcctggttttgtgacatggcctcccaagggttggcctccaggtccccacagtgggagaagggagagtggacgactctcacccactcttctgtgtctgaaaccggaactgacgcagttaatcccactcacagcccattggccaaaatgagtcacatggccccaacccaaccactgcgggagctgggaaatggagcggtgcctgtggaagagaaggatttctccctttcctaactgatgtggttctggagttttggatagcggagtagtcagactagtgtgttcggtttctaacttcgaactgggtgagtctgggcagtaaggaatgtctgtatttggggagcacaccatttctgccacacctaaaaccatgcaccaagtacatgtgcagatagaacgttctagcactgccattgttccctcaagctttcctgtcccctgattgaaattgttggcttgcactagggactgtggtgtacaaaggtgctcagggaagagccggcgaggtggtgaccattagaatgagtagtagtgtctgggtgcagtgactcatgccccattgaaactgttggcttgcattagggactgcagagtgtgaaggtgcctagtgaaaagccagtaaggtcataaccattagaataggtagtatcagccagccgggcatggtggctcatgcctgaatgatgtcattggcttgcattaggaaccacagagtatgaaggtgcccagtgaaaaactggtaacgttgtgactattagaattagcagtattggctagacgaggtggctcatgcctgtaatcccagcactttgagaggctgagacaggaggactgcttgagctgaagagttcaaaaccagcctaggcaacatagtggaactctttctatataaaaactttttttttgttaaattagaagtagttgaggctgggtgcagtggctgacgcctgtaatcccaggactttgggaggctgaggcgggtggattgcctgaggtcaggagttcaagaccagcctgatcaacatggtgaaaccccgtctctactaaaaacacaaaaattagttgggcatggtggcacatgcctgtagtcccagctactggggaggctgacaggagaattgcttgaatgtgggagataaaggttgcagtgggctgaaatcaagtcattgcactccagcctgggcaacagagcaagccgagactccatttcaaaagagtagtagttggatctaccagcgggaatcttaatagggatgtgagatgtgtttagatctcaaagcctgaccctgagtcttaaaatcccaggtcagatcctaagcagtcccagagagctccacctggtgtgcatctgtgccagtgtcttggggtggggcagctgcatgctcaggtggaatccggggctgagttcaagtttaatccactttatgaagaggaggcagagtgaggcataactcctcatccaggggagtggaagtactgtggaaggaagctctgttttgtacctactacgtgctggccctggcctcactgtgcagaactctccacattggaaaggatccccccagaccagagaggcgtaaggagggggctggtgctttccagtgttgaactgttcatctgtcctcacacccaccatcgggtcctacagcaaatttgtttgattttctgcaaaacacccagaatctatccactccccgtcctcccattgccaccacgctggtcccagccaccccactttctccctgcatccctacaacagctgccacagtggtctcgaggcttttgcccccagccccccacacacacatcagtgtcctcaacctggtggctgtagtgaccttatgaaaacacgcactggccgggcacggtggctcacgcctgtcatcccagcactttgggaggccgaggcaggcagatcacctgaggtcaggagttcgagaccagcctggccaacatggtgaaatcctgtctctactaaaaatacaaaaattagccaggtgtggtggcgagtgcctgtaattccagctacttgggagactgaggcataagaattgcttgaactgggaggtggaggttgcagtgagccaagatcacgccactgcactccagcctgggtgacagagtgagtgactgatggtgaggacacgggctctgaagccacactgcttgggcagagatgccactcattctgtttgttttctcatctgtcaaaagggcctgatggtagtaccttcctcatcaaaacgttccagtaaggggcccagtgaggtggcttcctcctctggtccactgaatgcgtgcgtggcgggcatttaaagcagtgtcaggtatacgtagttacgtgtttgcagtggcgaggtggactgttgagttttaaagagtctactgggcgcaggcactgaccagagaggaagtctgcagccttgatggatgaaattcgtgttccacccaccagccagaccctactggcagcagcccatggcgggggtattaatggcctgggcatcccctctggcgcgtctccagactgccgtggtgtgggcccaacagcagtctcgttagcaggctggcaggtgccggttcccacgtgctggccgcctgtggcccaccctctgctccctggcacacagcctaggaaagagagtctggtggccctgggtcatccccagctgagtttgccaaatgcccacatggcagcccctgcctagggtcactctgcaaggcaggtggctcagctccagccagagaagacaggctgcatctgccgcccttcctttctctaaaggacaaatgtgccctgtgcaatgactttggtattacacccagaaacagatccccactctgtccttactgactgggtcaacttggcaagtcatgtcaaccccttgagcctcagtttcctcacctgtgaaatggagctaggaataggtagttgtgggtccacagctttgcaggcatgactaggggcaggtcaagaatgcggacttcctgccccactttgaaggtggtagaagctgcagttagaagtttactccaggccaaaaggggcatcacaaaacctgtgaggatgggccatcagaaagtcccatgacctgatgggcggagcaggccctgtgtccttaagaaaaggtggagttcttgccctgccacccctgacaccagcaaagccactgctcaagtatctgtggatgatggatggcagcggggcaggttagaccggggattctcaaccaagtgggtctttttgttttgtgttttttcagacagtcttgctctgtcacccagcctggagtgcagtggtgtgatcttggctcactgcaaccttctctgcctgggttcaggcgattctcctgcctcagccttcagagtagctgggattataggcacctgctaccacacccggctaatttttgtatgtctggtagagccaggggttcaccttgttgtccaggctggtctcgaactcctgacctcaagtgattcacctgcctccgcctcccaaagcactgggattacaggcatgagccactgcacccggcccaactaggtggctttgaccccctgggggattaatggcagtgtcacaagtctggtggcggtagaaggaggatgttattggcatctagtgaagaagaggccaggggcgctgctgaacgtcctacgatgtgcaggacatgtccccacagcacagaactatctggccccacgtgtcaataaggttcagaaagcctgggggattgccttctgtgcttccacgaacacatatccatgtattatgtcattcttgcggcaatgccacgaggtcagtgagactccctgactagcatacataatgttaggatctagggagttgtctaatgtctcacgctgcccttcccagcgatctatgtgtggccttaggcttggctactttagacttagtccctcttttccggtgcctgcagctggtttggtgagtccagtattaatatactgaccgctgtcagaaagaggagtgaggaggctgggcatgatggttcacgcctgtaatcccagcacttttggaggccgaggtgggcagatcacctgaggtcaggagttcaagaccaacctggccaacatggtgaaaccccgtctctagtaaaaatacaaaaataattagccaggtgtggtggtgggtgcctataatcccagctacccggcaggctgtagcaggagaatcgcttgaacctgggaggcagaggttgcagtgagccgagatcttgccactgcactttagcctaggtgacagagtaagactctgtctcaaaaaacaaaaaaagaaatgtgtgaggaatgcaacaagctgtgcattgaccacccttggttacagcaagttctccacgctcagccgggtccagcctttggctgtcagcagcatctggagcggaactgtgaacagaaacactccaggtgttccgacgggtgctggggcgcccccagggagctggaatttggtttttagcaaccacatataggaaatgaacccgccagccacagtatctcacgcctgtaatcccagcactttgggaagctaaggccagcggatcacctgaggtcaggagtttgagaccagcctggccaacatggtgaaaccccgtctctactaaaaatacaaaaatcagctgggcgtggtggtgggcgcctgtaatcccagctgctccagaggctgaggtgggagaatcgcttgagcccgggaggtggaggttgcagtgagtcaagattgcacccctgcactccggcttgggtgacagagtgagactttgtctcggacaaaaaaaaaaaaaaaaaaaaaagaaccaagtcctcgggcaaattctcccattgagggctgtgaagtcttggctcctctgttgtttgttttggaaaccaaacttgcatatttgactttctcatgcgtggagaggacccatgcttggcatgggggggcacctggtttttgtgtccttggagctcatctctggtgggggaggaggagcagcaggagatgcgagggctgtagttctcagtcctggccgcacattggaatcctatgggggagctttaaaattatacaccaaactcggccaggtgcggtagctcacgcctgttatcccaacactttgggaggccgaggagggtggatcacatgaggccaggagttcaagaccagcctggccaatatgctgaaacctcgtatctaataaaaattacacaagttagccaggcatggtggcgcacgcctgtaatctcagctgcacgggaggctgaggcaggagaattgcttgaacccaggatgtggaggttgcagtgagctgagattgagccactgcactccagcctgagcaacagagtgagactctgtctcaaaaaaaaaaaaaaaaaaaaatacacacacacacacacacacacacacacacacaactggagaacagagcatggtcactgggggcaggagcgagagtgatgggtgtggtcggaaaatggtggtggctattccgtatcctcaccctggtgtggattcatgagcctacatgtgtgataaaactgcatgggacaaaataaacacacacacacacaggagtacaggtaaaacgggaaatcgagcaagattgttgtgtcaatgtcaacaccctggctgtgatgctttatcctagagttttgcaagatgttaccattgggtgaaatggggtaccaagtacacgaatctctctatattattgtttctttaactgcatgtgagtctgggattatcccaaaataaaagtgttaatttgtaaaaagtacacacagcatggcagttcccagcctcagagattctgatttaagggtctagctgggagcctgggcatgtgcttgaggcccccaggtgagtccagagtacagcggggctgagagtcgctgttgacattggctgcagggtggacagggcgagatgggccctgcccgggcagacctgtgtattgctaggtccttccggctctgatgctctgtgataattggccactttctctgccattttcctcccagagagcaaacacaggtctagactcaatatcgtgtggagctatcgatgaccacgggtcacttccatctccagcactgcaggctgtgcgggctggtccaactggggtacggttgagggtcctggctcagaccaggcctgactcctgggccagtctgtaaaacaggcccttctgggccagcagctgggccgggctgccgctctctgccacctgccccttgtccatgaccagaaccctgtgggggagagggagacagagaggctctttggacaccagcccaggctctcggcagctgtgagagcccagtgtgcctgcgctgaggttttctccatagaagtcctgctttccatgcggctccctggccctcacagctgggttggaagcgtgtgctgggcgcatgtccttgggcagctttcccacttggcatgtgttcccgggcattcctcccgctctggccccattcaggacccctccagctctaacccgaagcccagtggcccaggactgcctccgcctccttcccccaccactgcagggctgctgtgaggtcaggccggggcgggagccttaccgggcacagtccatcacggagcgcaggcggtgggcaatgagcagcacagtgcactgtgcaaaccagctcccgagcatggcctgcatctgcagctccgtgccagggtccacggcagcagtagcctcgtccaggatgaggatctgggtcttccggagaagggcacgtgccagacacaggagctgtttctggcccacgctgggaacgattgggacaattagctgggacgtgcgtttgtcggcacatggtgatgtgtgggtgtgcccagaaacaggtccctgaagcagtgcaggagtgaggtgcctgtgttcaggcatccccacacatggggtctggggtctgtggtctgcagaactgataggaagcctgttcctgccatctttgagcaggctgactgtaggcaggtcattcaaaccctttgtgcctcagtttccccacctgtgaaatggctattttcttttttctgtttatggctctttttttcttcttcgtttttctttttttttttgagacggagtcttgctctgccacccaggctggcgtgcaatggcacaatctcagctcgctgcaacttctgcctcccggttcaagcagttttcctgcctcagcctcccaagtagctggaattacagtcatgcgccaccatgcctggcttttgtatttttaaagtagagatggggtttcaccatgttggtccgacttgtttgaaactctcaggtgatccacctacctcagcctcccaaagtgctgggattacaggcgtgagccactgcgccccggtagttctatttctagtttgttttttgagaaatcatcatactattttccatagtgactgtactaatttatatttcccccaacagcgaaagcacagctttcacttcagtcatgccgttgcaaacaaacctacaatgactcactgctgcttcaagaatcaaatctacagtcttcctaagacattcaaggctggtgtcacgtgggccttaaatacagatgtgtacaacacctgggtgggattccaggcgtgatccaccgtgcctggcctgtttatggctatgtccagttctatttctagtttccaccttgtgccaaacacattctaagtgcttgtatatattcactcaatcctcataatgtccaccaaggtagatattattgttctcttcttttgagagaagaggacacagatacagagaagctcagtggcttgaccaaggtctcaaggctagtggtgggtccataatttgaacccaagtcctctgaccccagagtctgtgctcctaatggatccgtcctcgctgaatcgtgacgacatggcacataaaagtgtgtgggtggcggggcacggcggctcacacctgtaatcccagcactttgggaggctgaggtgggcggatcacgagatcaggagatcgagaccatcctggctaacacggtgaaaccctgtatgtactaaaaatacaaaaaattagccgggcgtggtggcgggcgcttgtagtcccaggtactcaggaggctgaggcagaagaatggtgtgaacccgggaggcagagcttgcaagtgagccaagatcgcgccactgcactccagcctgggcgacagagcaagactctgtctcaaaaaaaaaaaaaaaaaaaaaaaagtgtgtaggcttgtcacagaataagcccttggcatggagtagcacccttcgtggagggtggaggagttgagattccaggttgtgagcccagtgagcccctgacccaggtgggaactgacccctggggccccagcatggctgtcttgcacagtaagcccttccatgaaacagcatccttttacatgatcagaacctactatggtcatgcaggcgttagagtgcctgggtcttgtcccaacctcactacttttaagctgtgtgacgtcaggcaagccccaggcctccaattccaactctgtgaaatgatgttatcaggagtgtgactcaggactaaaatgagtatttactctttgctctatgcctgccactgtttcaacaactttgtgcatataattcaatccttgcaaggtaggtaggtgctattattcccaccttacagatgaggaaactgaggcacacaagataagttgcctaagatcctacagctagtaagtggcagggcggggcgggggtgggggtgtggggtggggggcctggatttgagcccaggcagtctgtcacctgtgtatactcttacccaccaagcaacgctgcctctctagtgctggaaattattgcctaccacaagcccttcggacaccctcagggtcagaggggtttataaatccagaacaccttaggtttttttttgtttttttttgagacggagtcttactctgtcacccaggctggagtgcagtggcacaatcttggctcactgaaacctctgcctcccgggttcaagcgattctcctgtctcagtgtcttagcctcccacgtaactgggattacaggcgcctgccgccacacccagctaatttttgtatttttagtagagacggggcttcaccatattggtcaggctggtcttgaactcctgacctcaggtgatccacccgcctcggcctcccatagtgctaggattacaggcatgagccaccgcgcccagccactttggtttttctaaaggcatatacctatacacctatgttcatagtggcattattcaaaacggccaagaggtggaaacagcctgggtatctactggcagataaacggataagcaaaatgtggtctatccatgtagtggaaaattattcggccttaaaaaggtagagaatctgacacatgctacgatgtggatgacccttgaagacatcatgctgtgtgaaataagccagtcacaaaaggacagatcctatgattctgcgtctatgcagtgtctagagtagtcacactcagagagacaggagaatgctggtggctgggcgctgggggaggggacaaggagagttagggtttcatgggtacagagttgtagttctgttgtgtaacagtgtgaatgtacctaacactacagaaactatacactgaaaaatgggtgagatgggcccggcgtggctgctcacacctgtaatcccagcactttgggaggcctacgcaagttcgactgtagcctgggcaacatggtgaaaccctgtctctacaaaaaataaaaagattacctggccctggtggctcacacctgtaaccccagctactcgggaggctgaggtgggaggaatgcttgagcctgggaggtggaggttgcagcgagccttgacctcaccactgcactctagcctgaatgacagagccagaccctgtctccaaagaaaaagaaaaaaaaaaaaaaaggttgagatagtaaattttatgtgtatctttccacacagctttttgttgttgagacgaagcccaggatggagtgcagtggtgcaatatcggctcactgcaaccttcgcctccctggctcaagcgttcttcccacctcagcctcccaagtaactaggactacaggtgcatgccaccatacctggctaatactgttgtccacagagatagggtcttgctatgttgcccagactagtctcgaactcctggggctcaagcaatcctcctctctcagcctcctgaagtgctgggattacaggcatgagccactgtgcccagtccacacttgacatttaccaaaaaaaaaaatcctatattatagtcccagtgagtggtgaggttaccacccgatatcaaacaatattttcatagcaaaataaatactgagcaagagcaataaaggctatcagtagccctgtgtcagttgaggttgggttttgccaccaagtaaatatagaagactaactgctaatttaggggggaaaaccttggtattcagagactgtgtcagagcttggaattgcagataagagacatgtggttattaatgtaacagagtgataatcctatcgggggaggcatttcctgaaggcccttggggagggcatggccatcccctcctctcccacctgcaggtcccagccatggtgggacgaccatacctcaggtcctcgcctcggtcagcacacttgtactgcagctggccgggcaggctggccaccaaggctttgagctgcaccgtctccagggctgcccagatagcctcgtccgagtgctcctgcagcaggtcgaggttcatccgcagagagccagggaacaggatggggtcctggcggggaggggcggtgggtcagagccgggtcccaccatgcctcccatctttgcccaccccctccaccagcctcacctgggggatgatgctgatcctggagcgcagtgtgtgcagccccacgtgggcaatggggaccccgtcgatccagatcccaccctcagctgcctcctggagccgcagcagcccactggccagggaggacttccctgccccggtcctgccaacgatgccaacctgacccggggttgggaggaaaggctgctctgaccagagggtttgtgggcatnnnnnnnnnnnnnnnnnnnnnnnnnnnnnnnnnnnnnnnnnnnnnnnnnnnnnnnnnnnnnnnnnnnnnnnnnnnnnnnnnnnnnnnnnnnnnnnnnnnncatccagaggaacctctgtctgggcttctgaagtggtacggtccttctcagggactgacttgatggacctgtcatttagaggaaatgaagacaaagtcagtatctctcccaatggtggggtgtatgtgcctaaccctcaggcccactgacagccactgagctctgggtacactctgtactctttcattcattcatttatctaacagaatactgaccagatatcacacttcccttcttcccatatggtacccagctaaatgccatctattaccccagggtcaagcaagcccattcttctgatgccaattcacaggatgaacttaacttgcccaccattggaactctgttctcagaattttcttttttttttttttttgagatggggtcttgctgcattgcccaggttggtctcaaactcctgagctcaagcaatccacctgcctcagcctcccaaagtgctgggattacaggcatgagccaccatgcccagcctgttctcagaatttttattttggcttaagctttcgtgcaattgttttgttcctactgtataccatcagatttgtcagtccaactggcagaatataaattatgcacaattcagatgctaaagactctttgaatgttttatctgtggatgagtgggctgacttaacctctgtgcctcagtttcctcagctgtaaaaataggaatattatctatctatccatccatccatttatccattcatctacatacctgtatatctacatatacatgtctacctaccttctattaaattgaggttagcccaaagctgcctccttacatattttaagtttggcctaaaggttttccccgtacatagtgaactgtaacctaattggactcaaacagactgcaacctactcctgtgtcaatcactgagtttcagccaatcaaaggcaaccaaccgttcaaaccatgttccaataaagcaaacgctgagctgtaaccaatccggctgtttctgtacctcacttctgttttctgtccttcaccttcctttttctgtctattaatctttgaccccgtggctgtaccagagcctctctggacgtattctggttcagggactgcccgatgtgcggatcattctttgcttagttaacctctgttagccaggtgcagtggctcacgcgtgtaatcccagcactttgggaggctgaggcaggtggaacacctgaagtcaggagtttgagaccatcctggacaacatggcaaaaccctgtctctactaaaaatacaaaaattagccgggcctggtcacatgttgcctgtagtcccagctactcaagagactgaggcatgagaatcgcttgaacctgggagaacggggattgcagtgagccgagattgtgccattgcactccagacctgggcgacagagcaagattctgtctcaaaaccccccccccccccgcaaaaaacaaaaaacctcagacacattaaatttgctagaggttaatttggcacaatctcggctcactgcaacctccgcctccgaggttcaagtgattctcgtgcctcagcctcccgagtagctgggactacaggcacatgccaccacgccggcttttttttttaaattatacttatttgtttatttttagtagagacgggttcaccatgttggccaggctggtctcgaactnnnnnnnnnnnnnnnnnnnnnnnnnnnnnnnnnnnnnnnnnnnnnnnnnnnnnnnnnnnnnnnnnnnnnnnnnnnnnnnnnnnnnnnnnnnnnnnnnnnngtgtctactggttttcttttaacatgactacctatccatctgatcttacttcagattcttgtgcgctgtgaaggtggtgggatttctcagtgtgtgtgtgattgagaagtgccctcagggtggctagctgggatgggggtcagccccaatggtccctggggactgaggcccctcaagatcgctgccgcccaccacccctgtatagcaggcacttaagctcaggccatctggtatcagtggcctgttgttctgcttcccaagacccctctcattaagaggggagagtatcaggcagcaggtccttctgctgccgacagctccacagtgagcccagctgtgtcctggctggagggagctgagaaaagaggggaccggaggcctcctcctggccccttgcccacgtgttctggccagcgtcaagtgatgctgtgcatacagacccaagccctgtgcatagccagcctgtcaaagcataagtggccaggcctggcatggtggtttacagctatggggaggaaccagtcctgccctactgcagcattcagacaactccagcaagctggcctcggcccacttgaagacatccatcaattggaaggcatattgttcattccatgaactggccttatgggggcctaatcatcttggctaactggaccaattttggtaaattatccctcagcagggcaccatggggggacttcagcaggttctctatccataatggttttggttgcccgcctaactgcccgagatgcgggtggtcccttcagctacttcagcttcagcctgtgcccttctgagtgtggcaccatggtggactcacctctcgcgtctaagctcgggcctcctgcctgcagaggtgcctctggggtccttggtgctggtcccaggttctgtttctgcaaggtcaagagagtcctgtcacgcaacacggcccagatacccactttgacacccactgactatgtggccttaaccgctctgaccatccatttcccctgatctggctcctgccacatctccagcaacctctctcaacaccccactctgagttcttccaggaacatccttcaggcattcactcactcattcatttcttcagtcagtgataactgagcacctactatgaacttgaggttggaaaaacagcatttaacactgtacaaagtcaagttacctctgtttcccccaacagccttgctcaagcagttccttgtgtctggaatgctcttttctggctaactctcacctaccctcaggtaccatctcccctaggaaggacacctccccaccactatcccccaggtgtggccagtaactgaaagcaaatctgtagtagtttaaccacagacctgtaagcaacaagtaactgctactgtaagctgctaggatttggggggctatttgttacacagcatcatcacagcaaaagctgaccaacacaaacaggcaagttctatcttcaagcttcaggactgtgacattgtgaatcaacacttaaggttttaaccaggttgggccagtgctaagcagatgttctcagaagaagcaaagcctgagattgagggagacctggatgtgaatccttgctttgtcatgaagggatagtgtagagggtagcaattaaaaaacacattctctggaatcaagttgcttgggttcaaatcccagtgctgccacttacaagccatgtaacctgggactagttccttaacttctgggcctcagtttcctcatctgtgaaatggaaatgattctagtaccagcctcacaggggcattatgttgattaaatgagctaacctctgtgatgtgctgttagttgctacttttcagtcattgtgagtgagcttggcttggcaactttacttccagaaccttgccatgtatccagcacactgtttttttggattattagaaaccctagctagcatggtgtagcttgctaggcatcaaagtctttcttgggctgtctccatagcaactgcaagcatagactctggagctggacatactcaagttctaatcttgtgaccttgggcaagtgatttaactctctttgcctcagtttgctcatctgtaaaatgacagcaataacttcacatgcctctggggcatgtgtgagaatcaaatgaaatagtgtattttttacagaagcacttagcacaacccctggctcatggatgatgttatcggctattcttggagaaaggtgacctattaagagagctgtctgcttccaggcctaggcctgcagacagggtgtggccagagcactccattcatgccagtaggacccttcgagccttttcccccaagggtggcaggagccaggcctggagaatcagcaaagcccacctagtacctccttctcctctatctcctggctgtctggcttgatccagaagacacacgagggcccccttcctctgcagaagctcctggtaggaacccatctctgcgatggccccatttgccagcactatgatccaatcagcctggggcaggatgtggagtgcgtgcgtcacgagaatccgtgtctgggcagggaaggggtagaagttacacacatgtggccgggtgcagtggctcatgcctgtaatcccaacactttgggaagccaaagcatgtggatcacttgaggccagaagttcgagaccagcctggctgacacggctaagccctatctctactaaaaatacaaaaattagctaggtgaggtggcgcacacctgtagtctcagctactttggaggctaaggcaagagaatcacttaaacctgggaggtggagcttgcagtgaggtgagattggaccacagcactccatcctgggtgacagagcaagactctgtcaagaaaggaaagaaagaaagagaagaaaagaaagaagaaaagaaaagaaacaaaggaaggaaggaaagagagagagagagaaagaaagaaaaaaaaaatgtacggccgagcgcagtggctcatgcctgtaatcccagcactttgggaggccgaggcagatggatcacctgaggtcaggagttcgagaccagcctggccaacatggtgaaaccctttctctactaaaaatacaaaaaattagctgggcgtggtggcgggcacctgtagtcccagctactcgggaggctgaggcaggagaatggcgtgaacccgggagccggagcttccagtgagcggagatcgcaccactgccctccagactgaaagacagagcgagactccatctcaaaaaaaaaaagaaaaagaaaaaagttacacacatgtgcttggccagcctcctgagctgggggttggggtgggggtattgtccctggactcagagtggggacagctccccttcttgtgctcctgccgcctttcttgtaaacagcatatccaaatagagaaacagaggggactcccttagcctgtgtctcaaaacaagaagacaaggagtacatctgaccctggccaatcatccaaggcaaagctgtagtagttaaatcacagatccataaggaagaaacacctgctgttgtaagctgctgggatctgggggttgtttgttacatagcattgtcacagcaaaagctgaccaatacaaagaggaaattggactcaagtggaagggggaggtgagataaacttgggttaggactggatgctaagtgcttcctctgcctttgccctgtactgtctgacacatgttcccaaacttactgttccctggagtagcccaccaggcccaatgacctggttgaagacatgctggccaacgtgggcatccagggccgccagggggtcatccagcaggtacacagctgcctttctgtatacagcccgggccaggctcagccgctgcttctggcctccggagagattcatgccctgtggccacaaaaggaacagtggcctgagtcagcatctacagggtgaaactggggtgcccaggctgtggcaggtcagggcacacctgcccatcagggtgaggtacagctcaacatgcctattccctggggacaggcccagcttccaaggcactcgctctcaagccaacaatgcctccatccttacccgacctcacttctccacttcccaagcacgcttcctggaggagttacctacacttcccaatccactctgtctcctcctgctcactctctctatctctttgagtccaactcttgtttccctttctccactgagaccaccatccatttccctattccctcatccagtggcagcttttcagtcctacttttgtattttaaattttaattgttttcttttagttttcattgatatgtaatagttgtaactattcgaggggcacaagtggtatttggatacctgtagggcagtggtccccagcctttttggcaccagggaccagttttgtagaagacgatttttccatggacctgggggcagggggatggcccgggggatggtttcaggacgattcaagcacattacgttgattgtgcacttctattattattattactgctgttgtcgttgttattattgagatggagttttgctcttgtcacccaggctgggagtgcaatggcatgatcttgactcactgcaacctctgcctcctgggttcaagcaattctcctgcctcagcctcctgagtagctggaattacaggcacccactaccacgcctggctagtttctgtatttttagtagagatggggtttcaccatggtggccaggctggtctcgaactcctgccctcaggtgatccacccaccttggcctcccaaagtgctgggattacaggcgtgagccactgcgcccggcctacttgtattattattgcattgtaatatataatgactcaccatcatgcagtatcagtgggagccctgagcttgttttcctgaaactagatagtcccttctggggatgatgggaggcagtgacagatcatcaggcattagattctcataagatccctcacatgtgcagtttacagtagggtttgtgctcctatgagaatctaatgctgccactgatctgacaggaggtggagctcaggcggtgatgggaacaataaggaatggctgtaaatacagatgaaacctcactcgcctgccctctgcccacctcctgctgtgctgcctgcccagttcctaacaggccacagactggtgctgatccatggcccgggggttggggacccctgctgtagacaatatgtaatgatcaaatcagggtaactgagatagtcatcacctcaaatatttatcttttgtattgggaacacaaccatccttctcttctagctatcttgaaatatacaagtaaatgatcattaactataatttcccttgtgcactattgattactttaacttattccttctatctaggccttcttgtctttcattcattcttttaaaacttatttttatttatttttgagatggagttccactctgacacccaggctggagtgcaatggcttgatctcggctcactgcaacctctgcctactgggttcaagcgattctcctgcctcagcctcccaagtagctgggattacaggtacgccaccatgcctggctaatttttgtatttttagtagagatggggcttcaccatgttggccaggctggtctcaaactcctgacctcaagcaaccctcccgccttggcttcccaaagtgctgggattacaggcatgagccaccgtacccagccattcattcattcttacattcagtcattccactaataaccactgcctcgttatcataaaccaggcatggttctaggctctggagaaacagcaatgagcaaaacaaagttgctgctctcttaatggatccatcattctcatgaaggggacagagacaggcaatccataaacaagtaaggcagacagcacatcaggtggaaagtgctatgaacgaataaatagtaaagcagggggagccaggttcagggggctcacgcctgtaatcccagcactttgggaggcggagctgggtggatcacttgaggtcagaagttcaagaccagcctggccaacatggtgaaaccccatctctactaaaagtacaaaaaaaaattagccagttgtggtggtacatggctgtaattctagctactcatgaggctgaggtgggaggattgcttgaactactcatgaggctgaggtgggaggaatgcttgaactcaggaggtggaggttacagtgagccaagattgtgccactgcactccagcctgggcaacagagcgagactccgtctcagaaaaaaaaaaaagaaaaaaagaaaaagcaggtgcaggtgtagggtgcactaacaatagtagggtggctgtggtggtagataaggtggtcaggaaaggcctctctgtgaaggtgatagaagtgagggatgagccctggggactcctggggagagctttccagcagagggaacagcagtgcaaaggccctggggccagagtgtgctgtgggggatcagggaatatcacagagactaaggtggctgcagtaaagctgagaggtgatgatgggagatggggctaatggataccagagccaggtcacagggaccttgccagggattgtcatgacttgggctttgtctctgaggtaaatggggagatcacctgaggtccggagtttgagaccagcctggccaacatggtgaaaccctgtctctactaaaaatataaaaattagccaggtatggtggcatgtgcctgtaattccagctactcaggaggctgaggtgtgagaattgcttgaacgtgggaggcggaggttgcagtgagccgagattgcatcactgcatgccagcctgtgcaacagagcaagactctgtctccaaaacaaaacaaaaaacaaaaccacaagtggtgggctggatttggcttggggtcacagtttgccaacccctgcccaatccatagctccagatgcatatatcctgtttcttggacatctctgtccagaccccttggtgaggcccagagaggggaagcaattacaccaacattactcagcaaggcagggcagagtaagacaggagtctaggtcttctcactctcagttgtcagagagctcctcactgccaatccctgccacaactccctgcctctctctttgtgtctatttctgcttatcaattagtgattacgtattgagcacctagcacgtgcttgacgctgagctgagccctttttctccgctacttccctaaccattcctctcatttctccatcatactgcccatgatgagtcggggacccaaatgactcccaactgcaatgtctccctgtcccaaaaagacccccaaactctcacctgctccccaattgaagtgtggattccctcagggaagctgtccacatctggctgcagggcacaggcttctagtactctctccagccagggtgggtccagctcctgcccgaagcacacattctctaccacagaggtgttctgcacccaggcctcctggggcacgtaggccacagcaccctaaaacacaacttactttggtcacaggaggatgatggggacagaggtgggataggttttgaggagcagtgggagctgggctctcagtggtgggtgagaggtggagagaatgagtgaaagtgaacttggctgggatggggagggtgggaaggcagcgaggaagtgggactttcaggatggggacatcctagcagacaggctgggggtggcctcacctcgatgctcacgaacccctccacctttgacagctccccaaggagggcggacagcagggaggacttccctgcccccactggaccgacaacagccagcagacagccctggggcaccgtgaggtttattctggacacgcaagaggggagacatgaccttggttagggttcagcccgcctctgtgaggaaggatgagccccagacggagctgagctttcctgctctgggagtctccaagaggacctgtggggctgttctttttcccagtccttgtctagctatttgaggaactatcctgtgcacatttgtgcatgtacacatgcacacaaagcgtgcacacatgcatgcacatttgcacactcatacaagcatgctagcatgcacagcaacacaatgtgggcacgcatccacacacacacaagtgcatgcacatacccaatcaatccatgctcacacgcatacatgtgtgcacacatgcacaccacgcacacacacacagggttgactatagcctgagggtttcaccagcctggcctcctgccttggctcttgcgataaataggctctttcctccctccctcccgctactcttggtcccgccccactcctgtccacgtcccacagcccatcctccacccagtgaccagagggatctgttaaaacccaagtcagatcgtgacacttcccagctaaacccgccagcactcccatttcactcagggtcaaagctaaagtcctgacgatcaggaatgacatctcccgcctccttccgctctgtgcctcagctgctcggccctggccttgctgacctccttgctgtttcttgaacacaaaaggccagtggttctcaccagggggtgactgcatcccccaggagtcatttggcaagatctagagatatttttggatgtcacaaccagtagggggtgctgctggcatctagtgggtagagactggggtcagctaaacatcccacaatgcacacgacagcccccaacaaaggagtttcagcccaaaatatcaaccgtgctgaggttgagaaacccaggtccaggcactctcctgccccaggacctttgctgatgccattcccaccgcctagaaggttcttctcccaggccgggcacggtggctcatgcctgtaatcctagtcctttgggaactgaggcaggtggatcaccttgaggtcaggagttggagaccagcctgacgaacatggtaaaacccatctctactaaaaatacaaaaattagctgggtgtggtagcatgcgcctgtaatcccagctactcgggaggctgaggcaggagaattgcttgaatccggaaggtggaggttgcagtgagccgagatcatgccattgcactccagcccgcgtgatagagcaagactctgtttcaaaaaaaaaaaaaaaaaaaaaaaaaaagaacagctcttctcccagacactccttccttatgatctcggcttgaatgcaaagccttccctcgctagacatgccatcgtactctgttcccttgctctggttttctgtttgggcctcacctctatcagcatgtcaccccacgagagcagggcccttgtctgtttccttcgccctatccccaatacctagaacagagcgtggcccatacctagtgctctatcgatgaagtgagtgaatgacaaccaatacaaatactacctggggcatattccttctcttcttagggagtttcagggctgtctgagatttttggccacaaagaccaagcgatagagttggagactatagatgatcatgacctcggactgatacaggaggcacagaagtgagcacagctgatagggctgaaccttggggctcctctcagccagccctcccttggcatcgtcttggccagcctgggagcacaggggtgtctccccctaatgggggaggctcagatgccctggtccccgtctgcaggagatactggtctatgctgtgcaggtccccaccttcaggaggtagagatgtatcctgagaacctccccggcagagccccagcccagccaaacccaccctccagtcccaggctggaaacctacaccacctctcaggtgggaggcagcaggagccccatgcatcttctccctaaaaacatgaggctggttactacgggtgtcgttctgtacctgtggaggcagggagggctttcctgggaccaggcgaaggtggcactgtgtatggtgatgcaatccttcccggcagctgcagggcacaagaggccatttacaggagacccctgacctggccggcctctgcatcggagaggcccccaggcaccatcccccgcccccccaggggcagaggctgcaggaagaaatctctcccactgaacaaattgccctgctactcactggcttctgggtgaccccgcagggttcttgttctgtctgtgtcccatggctacataatccagggggaggcaaactgtggcccagagaccaaatcctgcctgctgccttttcttataaataaagttttattggaacacggccacatccattcatttctctatttcatgctttgagcagttgtgacagagactgtgtggcccacaggcctaaaatatgcacaatctggtcatttatggaaaaaattagtgaatttctgaaataaatatcatcaaatcccagccttcccagagtgaagggggtgttattaatttcactgtggccggcacagtgtctcatgcctgtaatcccagcactttaggaagcagaggtggtaggatcacttgaggtcaggagtttgagaccagcctggccaacatggcaaaaccctgcctctaccaaaaaatacaaaaattagccaggcgtggtggtgggcgcctgtaatcacagctacttgagaggctaaggcaggagaattgcttgaacccaggaggcggaggttgcagtgaaccaagattgcaccactgcactccagcctggatgacggagtaagactgtgtctcaaaaatactactgctactactactaattattattattatttcactgtgataacaagtgtaattagattagtggttcttgatccttaagacgtagttagaattgcctgaaagattttctaaaaatcaaagctctcatggcttagcccagatcaattaaattcatcgtcacaattagctgctataacgattaacatgcccattttggagatgggaacacggaagctcagagagatgatctacttgtcaggatcacccagctagtcagtgctggggctgggatttggacctgggcagttgaatgccacaggctcggcttcttaccactatgtgggtgttttccaggtacacagtttgcccaggttcttcagtgcaacaagggggagggtgtcttggcccgtggcataaaagaaggatggggtggagggggaagcccaggtaacttgagcttggtaagtctcatcgtgcaatggtgcttgaaatgctgctattttccagcttgatcaaaatgctgtcatgcttattacctgggactttctgcatgaggacaaggacctggtctgttagagcaggagtcctcaacccccaggccacagactggtaccagtctgcagcctcttaggaactgggccatacagcaggaggtgagcgcagggcaggtgagcagagtgtcatctgtgtttatagccactccccatcactcccatcaccgcctgagctccacctcctgccaaatcagcagcagcaatagattctcaaaggagcacgaacacttgtgaactgtgcatgtgaggaatctgggttgcgtgttccttataagaatctaatgcctgatgatctctgtctcccatcacccgctttggggccatctagttgacggaaagcaagctcagggctcccactggttctacgttatggtgagttgtataattatttcattatatagtacaatgtaataataataaagggcacaataaatggaatgtgtttgaatcatcccaaaaccacgcgcctctccccggtccgtgggaaaactgtcttccacaaaaccagtccctggtgccaaaaagcttggggaccactgtgttagagtgttccctgttgtacacccaggatggtacaaagtgggcgctcagtgagtggtcgctgaatggctagcagaaagaagagcagcacggtgccagtttccaagtgacacgcagatggcgtgatctgcacgtgtcatccattgcccgcagcccccatctccccccagtactgatgctggcttgccattatgggccggggtggcccccacatcccccatccctcccacacccctcctgccagactcagcactcaccgcttccagaggaacttgagtctacgacaccagggtcaacttcttccaggcagaggaaggtgaccagacggtcaaaggacacccgggcctaggaaaaccgaagccgcaggtcacccagcaagaagagcaaagaactcaggttttgggtgtcggtgtctcaagatgtgtggcaacagcttcctgtctaccaagctctgtgcataggaggcgtgaggacaaagctttctagttcatgggaaacgatgcaacccgagtggtgaccttgatggtggtgatctcccacctctgcgatcctacaaatcagtgacaccgaagcaagccagctgccattctgcagacaagatctgggaagaggatggtggcttttccaataaggttatcaagccattgtgtggaacaatttcaaatgttgtccacctgggggcgctctctcccagtcacaaacccatctttggggaagaaagagaccagtcgttaaaatagagattaggccaggtgcagcggctcatgccggtaatcccagcactttgggaagccaagtgcaggaggatcacttgaggccaggagttggagacctggggaacatagcaagactctttgtttctacaaaaaattaaaaaaattagccggatgtggtggcccatgcctgtagtcccagctactcaggaggctgggaggtagaagcatcacttgagtccaggagtttgagcatgcagtgagctgagatcgtgccactgcactccagcctgggtgacagagtgagacactgtctcaataaataaattaaataaataaataaataaataaataaataaataaggcggctaggcgcggtggctcatgcctgtaatcctagcactttgggaggctgaggcgggcttattacatgaggtcgggggttcaagaccagcctggcctggccaacatggtgaaaccctgtctctactaaaaacacaataaataaataaataagactgggtgcagtggctcatgtctgtaatcagcactttgggaggccaaggtgggcagatcacctgaggtcagcggttcaagacctgcctggccaacatggtgaaatctcatctctactaaaaatacaaaaaaaaaaaaaaaaattagctgggcatggttgtgcatgcctgtggtcccagctacttggcaggctggggcaggagaatcacttgaatctgcgaggtagatcttgcagtgagccgagattgcaccactgcactccagcctgggtgacagagtgagactccatctcaaataaataaataaataaaaataaaaaataaaaaacatggagatggctcaggtatgccgccgtttcttgttttcaccatgctgaaaggactagagatagcaaaggaagagaaacaaaatcgctttgtataaaaaagggaactgacatgattgcttgtatgtggaattgctgggcagatggacaagtatgcatgttctgaggtgtgtgtggaaaggtctgcacattgccctccaaaggctgaccccttccagatgtatttgctgtactctctgcccgcctctgttcttgcccctacccgcctcttttccagctccacaccatccctctccctcccactctgtcttccctctcctctgcaaatggcaggggtagggaagctggagccaggtgtagcccacgcactctcccaggatggctccagcccttgcacccacctcacctggacgagggagtggatggagaagggcaggaaagcctgggccttgttgaggatgttgagaactgtgagagtcacaaaggctttctctgcattcatagcattctcggccaccagagtgtggacagcaaacaccaccagtgcgacctggggggtgggggggacacgtggggcaacagtgagacacgcaagcatggatagggcagcctgggcaagctgtggtgcctgcacggtccatgtggcccacccgccatgtccgcatgtgcttccctccgtagatcccactcccagtcctgctaacacatgtcctctccgcagtcataagctacataaggctctctctaaagacacagcgcattgctaatggtgatgagtgcgcagccccacggctctaggcatcactagaacctaggggagaacctaatgcctctaggttccaggcatcgggggacagcagagtttttgatcttggtagccctgttgttctagacgtggtggaacttgtgattctagagtcccttggaagatgactctaaagttgcaggcaggagcagcacttgagggctctaggtgttggtgccatttgtggtgcttttttttttttttttgagatgaagtcttgctctgtcgcccaggctggagtacagtggcatgatctcggctcactgcaacctctgcctcctgggttcaagtgattctcctgcctcagactcccaagtagctgggattacaggcgcccgccactgcaaccagctaatttttgtatttttagtagagacagggtttcgccatgttggccaggctggtcttgaactcctgacctcaggtgatccacccacctcggcctcccaaagtattgggacgacaggcatgagccaccacacccagcctacgtatcaaattttttaaaactgtggtttaggaaggttgttctgacagccatatgaaataattacagaatggcaggacaaggatcacgtccagtgacagggtggctatggacatctgctggccaggatcagggaagtcactctgacccaggattctacctctgccacccccctgcatctgtaccctcctccccacatcggtagaagcctggaactctctctgagagttcagcagactttatcagccactgccacctttgctagaataatatgattaattagttcttgtagaagacagcagggacccagagagaacaggatccagaatgagtgggttttgatggacggggtggtaggatctggggggctccacctacctcaccctgcccccacccccgcactccttccccagtgctgctcagcatagagactagagtgacgtcaccagaaatgtagacacttggaaggacaccagcgacacagagaagaggaggccggaggtccgcaaggcgcccagctcctggcctcggatgcccaggactctgtccagaaaggctccctcccagccatggaacttgatggtcttcgagttcctgaggatagagctggtgagccgtgcccgtgagtccttctgcctcatttgctcctcctgggatcggagggaaaaagagagatgaagacagggacagttga

SEQ ID NO: 683 - DNA, 177380 bp, Homo sapiens
aagcttgtaccctttaatgatttctgatattggaacgaatatttagtacaaagtagttttgatcagacaaacattgcacaagacattcaattttaaataagattttaaaaaacatatctcaaaatgtcacatacctttggatatacttcaaatatggtgtatagtctattacagcaggaaaactgccatccagcccctctccctttaggcagaaactaagacaatagaaaataaatatttcctattaatatataaaattttaaatcaaagttaagtttcatgaaaaatctcttgccagagacgtttctctcatcaaatggcaagcgaatttttttgtttgcaatttaattgttacttgtcagaaataaacgcctgaataaaatattctaccttcaataccaatgacaaggcattgtacaaattaatacactatcaatgggttacattaaaccaacagttaacattcttaatcccagtttttttgtttgtttttttttttctttttttttgagagggagtcttgctctgtcacccaggctggagtgctgtggcatgatcttggctcactgcagcctctgcctcccgggttccagcgattctcctgcctcagcctcctgggtagctgggattacaggcacccactaccatgcctgggtaatttttgtatttttagtagagacagggtttcgccacgttggccaggctggtcttgaactcctgacctcaggtgatctgcccgcctcagcctcctaaagtgttgggattacaggtgaaagccaccgcgcctggccttgttttttttaaaacaataaaacaacaaacaaacaaaacaagactgtaacaaatttagacagagctagtgacgtgatataaaaagttaacatccatagagggatcaaaaagacaaccttcacattccatctatcatgttcatcctccacaattaagctaattaaacctaatactagcttattaaattttaataaagttagacttgtcaagtgacaaatatttagaaaaggaagtgctttactataaaagataacttcagtgaaaacgaacagcattatttttatcaagactcaaaagtagaatttcatttgtcttatacttattttgttaatattcctgaattttcaaatgttatatttcaataaaaatataatatttccttcattccttgtgtttgagttttcttatagacaaaccttttactttcaatataatgtaaaatctgggatcgattaaagaaatgcaaaaaaagtgtctataaatctaaaaagaacttgtattgcccatttttagcacttgttattttagtgtagaaccagttcatcttgttgacaataaaagtaaattttaacaatttttttttttaatattctccatacataacataagagacgtaagatacccaagatagcctctcaggatcttatctcaacacgtgagataatgagaatctttctggctttgaaactactttaagtctatttcttttaattttaaagcagtagctgaaaaatactaagagataagattcaaagccttccttcattagggagggggctgttggggaatgggatatagtctaagttttctttttatccaagctacagagcaagcctatcaattcattaagtttcaggcagtctcttttctgagagcaaactcatttagaaaacaaactgatgtcatttgaaagagaacaacatgaatcaaataacaatatccaactgtgtgctttacttagacaactgaaagaaaaaaatcataagtagaaactattaagatatagaataatttaaaaactgaatgcatttggttaagtacctgaaatcaatagcattgagtcctagaagcatgccagcaagcatatttgcttcttcacccaagacaattgctccatcttcataaaatctcctaaaaaatgaaatgggtgaatatataaaatattaaaaataaatggaagtttgatcgagagaaatcatttagagcccaaactattgtaggaagagctaaattttatttaatttgtatttttaaaaaaaacatatttccatcactgaagttttgaagatatttagaccaaaataaagagacaaaacaacaacaacaaatccctgaagaaactaaaacctgccaatataacaaaaagaattctctgtttccagctctcctaaaaagaaacccccaagtgagtctttcaatgggtctagagtgccagcatttttccttaatagtgaagcaatataaatgtaaagtgaaaggtggcaaattcagagtcatctgtatttacctattttcaaaatgaagtagacttgagttctaataaataagataaaattaagttctgtttttctataattgcaaagattactgagtaagttaagaatttgggaggcatacttgttagtaatttatggtaaccttaatagtgcaatcctaataaagcagatgggctaccaaggtggctgcatatgaaaaagaaagtattcaatatctccttgacaaaaatgggaatgtgaatgtatctttgttaattcctgtaaagctttacattttagttatcattagtttttaaaatatttttgaaagaaaaatcattatgtggccctaaggtatttttccaaaaatgaatgtaaaatcatttaatctacttcttttaaaacgtagtactatgtaaaatctagtttatatcagtaaccagggatgatcacactgctataagtatttatattacatataagagagtgaacaccactctataccaccccattaactaaaatgaaacattttagtaaatcaaaggtcttgctcttttcagtatttctgagtttataaattctgcaaaaaatttcaatatgctcataatcctaccatcaattttgaattgttgttcacagcttactaagtatttttacaaacatattacttgatacttgcaaaaaaacccataaattaaaggcagaaggaatcattagtttcaaatttaccatcaggaaaagtttaaaacaatttgcacaagctcatgttagatgaattgcttaagaaggctacccaattcttctttaagtcctatatcttctattaaatctacgtttcgtaaaacaaaaatattttaaaagaacttaatgtatggtatggttcataaggaatattaaatgaataaaaagtacaaaatggaaaaaatagtcaactatttactctctgacagatgtaaggctgcaaacaaatacagtggggagactggcttggaataaatgttttttattttcttggacctactgaaattgcttttactgatttatataaaaggagaaaaatgaaaacttctggcctaacaaaattagtaaaataaatggaaggatttttttacatattctactgaggtgtcctgcagaaaggtaaaatatttagacaaatatgtatgtttgagactttgtccctggtccaataactaagttggctattggcagaatatattattaacccctggaagaactatgcttctaatggtttcagaccactaaattctatgagacatatgaatttggaaaagaatcttgtttttttgatactgccaataacccattattcctagtacttcttatataagaaaaggtctacttcttttattcctcatcttgaacctaccattgtttaaaaaatacattctaaaaatcagctcaaaactattcttgcttgctttctaatggcacctttgtactagggagtgttgaagaacaccacggcaaaaaattaactggtttgagaaattttttaaaaactaaaggtcttttatgtgtgtgcatataataatgttttaatgagtttttcactttagttttactcattagtaaataagtaaattttctaagcgaatgatttaagataagtaaaatggttgctatatgtaaaatcaataattccactgaaaaaaatcatatcttaagtgtaagatatgatttaatataacagcaaaagaggaaaggaaaaatggaagaggaagggctagttaagaggattgcccattatatgctgaacttttaaattattagttctggttaagaaaaacattatttttcagaagatgtacttctgagcttaagataatatattttaaagtaattcagtatttagaaaactgaaacgatctgagaagataatatttttatcatttaatcaaagacttcattcatgtgtatgaaagaggtagaagctgtctcgaaaaattaatttcttctcttatgcaaactaatatatcaataattagactaaaaatctgattcctgtggtcaatactttcaaatattccaaaagatggtaaaatttcaaccttttcattttacctcattgaaaaattggaacattaaactttgcttatataaccaagatcataaaataaatgagccaggagtaaagcctgagatgactaatccaataatagtaaggtatatacttaaaattcccttttttcagttaaaaatattttttgttctaaagaaaatttttatgccaggcctggtggctcatgcctgtaatcccagcacttctggagccttaacaggcagatcatttgagcccaggagttagagatcagcctgggcaacatggtgaaacccacctatacaaaaaatacaaaaaaattagccagacgtggtggcacatgcctgcagtcccagctacttgggaggctgaggtgagaggatggcttgagtcaggaagacagaggttgaagtgagctgagatggtcccactgcactccagcctgggtgacagagcaaaaccctttctcaaaaaaaaaaaaaaaaaaaaaaaaaatatatatatatatatatatatatatatatatataggtatatatatacacacatacatatatataacatatataaatataaatatatataatacatatatgtatatgtataaatgagaagaatctaaccaaaacattgtactgcttaagttcaacatattataaatgttgaaagtaccaaagtaaaaaatacatatgaaacttccatttaaagatttttatattagagactatacctttaaatatagttttatattacagaagtgaggaaaaattacaagcaactatttgatactactgtgatctgggaaaaaaacttcctgatcttattaggtataccaccgtttccaagtatttatatgttgattagaaaaacattagtgactagaaaagtatttaaaataatgcccttataagaatatgcttttcttttaccacatataatttaactctaattgaaatatattcctataatgccaccttggtgtccattctgtaagaatattttaaggaattttaagtagttcaataacaaatatcctctggatgggatccaaggtgaataataaatataaattatgttgatactatctaatgtgatgtttcaaattttccttttgtgggagtcagaagttatcctacatatttgaaagcacaatattaaaatatgagaaagcttgtcttataaaccaaagaaatttcattattggcatgcttgttctcttcccccaatttaatgtaagaaactactgaaaggggatataagaaaattctccctcatgacatataaaacagatccctgcattataaacagatgttatattcaaagtcaaattgaatcaaaatgaaaaactgatgaaaaagtcaacctccaaaggtcttgccaagaatgtgagattcagtaattattttaataaacaaatatttattaaattccttttatgtgacaagaactgtgcgaggtactatagttacaatggtaaataagttagatttagatcctctctatgaagcatatagtctaggggaatagaaaagcaagaaacaaaagacaaagataattacagatgatgataaatataaagtaaataaagaggttgttgagatagagacaaatggaaggaaagcccaactttggaaagtcattaagtaaggcattctcaagtatttaacctgataccttagcccacagatgtctgatcacacagggctttgcaggccacagaacattaataataataataacacttcttgagtggcaggcatagtaataactttacatgagtcatcttcttaactttgccgctacatattattctccagagagattaagcaatttgtccaagatagacacagctagagtagggaaaccaggatctgactccaggaaatgtgacagccacagagccttctggctaatgtaataagaaatcatttcaatgttttaagtaggagctgacataatctcttttacttttaagatcagctggaagctagatggctactgaaagggggcaaactggaaggtcaggaggccaacaggtgagccttaggcaacagataaaagaggtctagatgactgtaagagccatggagataaaggtaaataaatagattcaaaatagatttggaggtaggatcaataagacttgcttatggattaattacagggaatgagggagaaagaggaatcaggtatgacttttagattcttgcttaatcaactatgtaggtgggcagtgataacatttgctaagaaagggtgaacagagttacaggggaaaaaaaattagtatatctgaactatctagctagaggtttaaatgtggtatcatggtcatatggatggtatttcaagccaggggaatggacgaaactccaggaagagagaatacagagaaaaatgaacagaggaaaaaaagcagaaaatgcaggactgagcccagagaatatgaacagtcagatgttaagtggaaaagatgacagaaaaagagacagagcgattaaggaaaagccatggaatgttgtataacttaaaggtgaagagattttttcaagaacgatgaagtagtcaacttctactggaagtagctgggagatggagtacagtatggacagagaaatatccattacattgggtagcttgtagattattggtattcttttaaaaattcttggtggagtgatgaggggcagaagccagacaagagtgggtaagagagtgactctaaagtaagaaaatgatgacagtgtgaagaagtgctttggagaagtctggtgatgaagtgtaatcatgaaattagcattggtagaggggaattataggttcaatggagaatcttttttttaaggtaggaggtactggtatatgttctataagggtaggattgatccagcaatagtaaagagattgaggatgaggagacagaaagttggtaactaaaggaagaagggaatcatatgctacctggtcttttgtgactggcttctttgctaagcttagcaggttttcaaggttcatccatgtggcagcatggatcagtactacatttctttttatgcctgaataacattccactgtatggatatagacacacatgcacctaggagtcatgtgctgggtcatatggtaactctatgtttaaccttttgaaaaattgccagactgtttttcaaagtgactgcacaattttcttttcccaccagcaatgtatgaaagattcagtttttcaaaatcctcaccaagatttgttattaagtgatcttttgaacatacccatcctagttagtatgcagtgttatttcattgtggttttgtatttccctgatggctaatgatgtcaaacaacattttagtgtttattagccatctgtataccccccttggagaagtgtctattcagattcattgcccatttttaaatgagttgtctttttattactgagttgtaaaagttcttcatatacattgtagatacaaaacccttatcgcaggggtccccaccccctgggccatgaaccagaacctgtccgtggcctgttaggaactggagctgcagggcaggaggtgagtggtgggccagtgaacattatcacctaagctccgactccttcactcaggcattagattctcacaggagtaagaaccctactgtgaactgcacatgttaaagatctaggttgcatgctccttatgatactctaactaatgcctgatgatctgaggtggaacagtttcatcctgaaaccattccctgccaccacggtccgtggaaacactgtcttccacaaaaccagtccctgttgccaaaaaggttggggaccgctgccttatcagattatgatctgtaaaaattgtctcctattctgtttgtcatcttttcaccttctttatggtgtcctctgaaacacaaagttttaatttttattatgttcaatttatcttaatagtgtaaaactttaatacatacttgcagggagaccccttgaaactattgctacagaataaaagatgaaatgctcctaattattgtaaatacaaaattccatgcaggattgtgtaaagacaatgccaggttggactgccagaacgagccaacagcacatgatgtgcttccccctgcagagagcctatgaatggacgtacagtcagggaggtttcacatcaccaagattcccatcccagaaaagcagatgttcatagctctaggaatggaatgcgacctttgtggagagcctataaacagacgcatgggggggcgcctgtccatatggataagatagggctataaacgtcctcatcttgccatggctcttctaggcctctttagggttaaggcatactcctttctgagaatttctggtctaaccggttgtctagcttcacatcctgtttccatggattgtttgtaaccagcttttgttgcaattgttactgctgattaatatcttgttaatcatacgttatggaaagattgtgtttctgttttaaggctctgttagaaattacacacacattatactgtaaattcttatctctgtatactgtacttctccatacaaatgtactgtacttctacatacaaatgttatgttaaagaattacttcatccccatgtgaccatctcacctcataatcaaatgaccctaaatccctcactaacctacccccgccctcactaaacttaataataaatgctggtatatctagtgcattgttggcaccacgggaccagaaggcagtgacccccctggacccagctttcactatcttgtgtgtgtctgttatttctcaatctgctgatctgcctaacaacagagagccccgttgcattgcaggctgctggccagatcctgcaatatctggtgcccaatgtggccttctttgttccttggctcagtgcactccaagtgccgtttgtgatgactagtcttcagtcttgaaggtaaggtctccaagtacgctttttccgactctcccctcttttcaggttttattatttctttcctttactgattttgggtttactttgctctttcttttctagttctttaagatatatcattaagtagttttttcaagtttttctacttttttgattgaagcacttcttgctataaacattctaagtactgcttttgaggaataccacaggttttgatatgttgtgtttccatgtgcatttgtttgtttttttaaattttcttcttaaattttgcactgacccactagttatttgagagaatattatttaatttccatgtgtttgcatagtttccaaaatttctctgttattgatttctagttttaccgccttgtagtcagaaaagttatttaatatagtttcaataattttggaatttttaaggctagctttgtgacataacatacccttcaaaatgatccatgggctgaggagaagaatgtgaattctgcagtcattggataaaatattctgtgcaacatctattaggtccatttggtctatagtccacctccaacccgatgtttcattgttgattttctgtctgtatgatctttccaatgctgaaatgtggtgttgaaatccccagctattattttattgaggtctagctctctctttagctctaataatatttgctttatataatctgtgtgctccattgttgggtgcacatgtatttacaattgttatattctcttgctgagctgacccctttatcattatattctgacatttgcctctttttatagtctttgtcttaaaatctgttttgtccgatataaatacagacaactttttttctatgtttggttccattggcatggaatatctttttccatccttctatttttagtggatgtatgtctttatagctgaaatatgtttcttgtaggcaacataattttggggccttggttttcttcatccatttctcctctttatgtcttttgattggagagtttagtccattttcattcaatgttattattgataaataggaattgactcctgccattttttaatttgttttctggttgttttgtgatgttttcttccttcttgtctttattttaatgaaggatatttttattgtgataagccttaatttattgttttatattttgtgtatatctctgtctgtctggaattggtcactgacatcttatatagttcattcggtgagatcatattttcctggatggtcttgatgcctgtggatgtccattgtttttttttcttggcattgaagagttagatattgattgtaatttttgcagtcttggattgtttatacatgtccttggcaagtttttccaagtattaaaaaggacttgggtgttgggaccttagtctttggtcactgtagccacgtaggcatcaggaagcaccccatgcacaaaaatactgtggctctttcagacttatacaggtactgtcttggtgctcttaggtaagatatgggaaaatgtcctgggatatcaggtggaaactcttgttcttttcctttacttccccccaaccaaacaaagtgtctgtctctctgtgctgagctgcctggacctggggtatgggtgacacatgcacccctgtgagcaccagtattgggactgtgctgagtcagatccaaagtcagcacaacacttggtcttgcccaaggcttaaggtggctactgcctggctaccacttatgttttctcaaggcccaagggctctacaatcagcagatggcaaattccaccaggtctgtgtccttcccttcagggacatgaattgtcttcagccctggttgggtccagagatgccttctgatagacagaacctcgtgaaaggaagcatgggaatctacctggtgctctattctactgtggctgagctggcacgcacactgtaagacaaagtcctttccactcttcctccccttttcctcaagcagaagagtctcttctcatggccaccaccatcccaggtctgtggcaattactgcctggttactgccaatgttcactaaggggccactgaatcctgcctggtctgattctctctcttcaggtcagcaggctctcctctcacctagggcaggcccagaaatgctgtccaagagccagggcctagaactggggaccccatgaacctacttgtttctctacatcactgtggctgagctaggaactaatctctaagacaaagtcccctgcattcattctctgtttctcaaccagaaggagtctctccccatggttcccacagatgagaatgtgcagggtcactcctgaagccagcatggccctgggtctcactcaaggcctgtggtgagaactgcctgggtaccactgatgtttattgaaggcccaagggctcttaagtctgcaaatgataaatcttgctgggactggatctttcctttcaaggcaatgggtacccttctggcccaggctgtgtctagaaatgtcaaccaggagctagggcctggaatgggggcctcaaagactgttcctgataccctattcttccgtagctatgctgatgtccaagtttcaatacaaagtcctctttactctcccctctcctctccttaggtggagggaaggagtctcttccagagctgcaaactgtgctgcctgtgtttggggcagcgatgatgcaagcactctcttggctgcactagctggtgtttcactaggtcatctccaccgaatatccactaacttcaagcccagcacatcaccaggacttgtccaggaattgaagtctctttggcctagactgctttttaaatttatttaagacccccaagaactttagcccatactggtaggtcttgcctgaactcaggctcctaccactgaaatggagaatttgcctctggctagagaagctccctctgtaggcactggctgagttatgccctgtgttgctttctgctgtgacagggcagtactgagttccaacgtcaagtcgcacaattactgtttgctgcctcccctgaatgcacagattttctttccataccactcagccattgctgggggatgaaggagggctggtgtaggtgattcaagattgtctttccctcttcagtgcctctttccttaatataatgttaaaaccacacactgcgattgcacttctgatttttggttcttctggaggtgtttttttttgttcggatagttcttcaatttggtgttcctatagggaggacaattgttggagccttcttttcatccatcttgccccactttcctcagttattatatattattggccttcctcaaatagtaaggtgtaaaatagcatattttcatacatggaagttattatattgaaaaatagcaaactttaataagatagacagatttttaaaaaggaaaaatgtctttgtggatagacaagatggacaaattaatgaaaataaaattggtgaaaaacagccctcatgaatagaaaaattaaaggagtcaaaaggaaagaaggcaagtttattagtcattagagtccctgaagaaagagaaggaagaccacatcacctccatctggagatatgcgaaaatctcacgagggggtgacatttgaacttggaacaggaggaatgactaccaattttttaggtagaaaagatgtagtaggtagcataatgccttctaaaatatatccatgccctgacttgtaaatatgctactgaaaatgaaaaagggactttgcaaatggcattaaattaaatatctaaaatggatattatcccaccatatgggtctgatgtaatcaagaaccccagagagaagtgagaggatcagcctcagagaagaagatgtgacaaaagaggcagaggttgaattgttgcagggccatgagccaagtaatgcatacatcttctagaaactggaagaggcaagaaattaattctcccctagaatctcaagaggaactgctgtcctgctgacccatctcagacttcttcagaattggaaaataataattggtattgtttttaagccactaagtttgtgatagtttgttacaggtaacaataggaaactaacacagatggagaaagacatccgaagaatctgaaaaatgcaaaacttgatgtacagcctattcagagaatgagagaaagtttgaagtgttttgactctatggtattgcagaagaaggtctggagaagagatttgtataaatcaaaacaggaaatgttacttaaagccagacaaaggatcttgtatgaattttatagcagatttctatcatagaaaataattttagcagtaatgagctgcaaacactggagttataagactaagaagatttttatattctatataattttattgtaatctggtcatataagcccttcacaaatgcttaaattagatgaatagaagaagataggtttagttaactttaataatattctctgctatactttttcctttgctcataatgattcctcatttcctcttcttttatataaaaatgagcataatgaatcattataataagagtagaagtatactgtaatttttcctaggaagcttaccgtatggtacttgtctctttgttacttaatttaacttgatctgtcaaatatcagacttgtaagagctcatgtgtcatactcattacagtgtcatattcttttaaggatctaatcccaaagagacatgcatcctcttgataagataaaaaatatttttatatgccacaactaagaaataaaaactcaatacacgctcaaggaataaaaggtattttaaaatagtattgcagattttttttcctagtcgatctttgttttagaaattcatctgggaaaaaaatgtagctaatgacagatgcatgcaatcaggtatttaatttgcctactcataaaaatgaataacttaacaatttctccaatgtaatttacaaaagtaaataacattgatacaaacattaataatcaaagaaatacaaataagcacaattggattactaaagtgaactattttaaaaagtatctaattttaaaaatatcacattaaaggccttttctgcatccatgagataatcatgtggtttttatctttgtttctgttaatatgctggattacgtttattgatttgcatatgttgaaccagccttgcatcccaggaaggtattgatgggacgtaactcaaaataataagagatatttatgacaaacccacagcgaatatcatactgaatgggcaaaaactggaagcattccctttgaaaactggcacaagacagggatgccctctctcaccactcctattcaacatagtgttgggatttctggccagggcaatcaggcaaatgaaagaaataaagggtattcaatcaggaaaagaggaaatcaaattgtccctgtttgcagatgacatgattgtatatttagaaaaccccatcatctcagcccaaaatctccttaagctgataagcaacttcagcaaagtctcaggatacaaaatcaatgtgcaaaaatcacaagcattcttatacaccaataacagacaaacagagagccaaatcatgagtgaactcccattcacaattgcttcaaagagaataaaatacttaggaatccaacttacaagggatgtgaaggacctcttcaaggagaggtcaactgctcaagaaaataaaagaggacacaaacaaatggaagaacattccatgctcatggataggaagaatcaatatcctgaaaatggccatacagcccaaggtaatttatagattcaatgccatccccatcaagctaccaatgactttcttcacagaattggaaaaaactactttaaagttcatatggaatcaaaaaagagcctgcattgccaagacaatcctaagccaaaagaacaaagctggaggcatcacactacctgacttcaaactatactacaatgctacagtaaccaaaacagcatggtactggtaccaaaacagatatatagaccaatggaacagaacagagccctcagaaataatgccgcatatctacaaccatctgatctttgacgaacctgacaaaaaccagcaatggggaaaggattccctatttaataaatggtgctgggaaaactggctagccatatgtagaaagctgaaactggatcccttccttacaccttatacacaaattaattcaagatggattaaagacttaaatgttagacctaaaaccacaaaaaccctagaggaaaacctaggcagtaccattcaggacataggcatgggcaaggacttcatgtctaaaccaccaaaagcaatggcaacaaaagccaaaattgacaaatgggatctaattaaactaaagagcttctgcacagcaaaagaaactatcatcagagtgaacaggcaacctacagaatgggagaacatttttgcaatctactcatctgacaaagggctaatatccagaatctacaaagaactcaggcaaatttacaagaaaaaaataaacaaccccaacaaaaagtgggcaaaggatatgaacagacacttctcaaaagaagacatttatgcagccaacagacacatgaaaaaatgctcatcatcactggccatcagagaaatgcaaatcaaaaccacagtgaggtaccatctcacaccagttagaatggcgattattaaaaggtcaggaaacaacaggtgctggagaggatgtggagaaataggaacacttttacactgttggtgggacggtaaactagttcaaccattgtggaagtcagtgtggcaattcctcaaggatctagaactagaaataccatttgacccagccatcccattactgggtatatacccaaaggattataaatcatgctgctataaagacacatgcacacatatgtttattgtggcactattcacaatagcaaagagttggaactaacccaaatgtccaacaatgatagactggattaagaaaatgtggcacacatacaccatggaatactatgcagccacaaaaaaggatgagttcatgtcctttgtagggacatggatgaagctggaaaccatcattctcaccaaactatcacaagaacataaaaccaaacaccgcatgttctcacttataggtgcgaattgaacaatgagaatgcttggacacaggaaggagaacatcacacaccggggcctgttgtggggtgcggggagtggggagggaaagcattaggagatatacctaatgtaaatgacaagttaatgggtgcagcacaccaacatgccacatgtatacatatgtaacaaacctgcacgttgtgcacatgtaccctagaacttaaagtataataaaaaacaatcacattaaaattagtataaatatttacttcaagggcttataaaatgcacagttctgttaaataaaatggctttgactagcaagagtcataagcctttgttttttattgatatgaaaattaatttattattgtaatattaataattcaaatgaataattatttcttttctatattttcaaaaaatcactcaaaaacaaaagtaaattatcacaaaaatattactcaataatatgtatcaagtaaaatttgaaaattcgaagtaatctaatgttgagtgttaaatcataatacacaaatactatgaactattatacatgtaattaaaataatgattatgaagatcaggtataaaaatagaagtgtcctactgtagtgaaatgaaaatggcagattattttgattactatgacaagaaacctggctgtatgtatggattttaggatgccaaaatgaaattcattcaaggtggtagaatttttattattattattattttctattacagattcaggaagaaaattttttaactaatgaaatttcatttaaatcacaagtgattatttttttcactgtgaaattgagatttatcttgaaaattctggtttgtaaaactaaatattagtcatttaaatatacagaatattgaaataaacttccatctttaataatctaaatatattttagacttagccttaaatttagaaacaatccaaaatattgaaataatatcctgaaatgtttttctataaaatacacaactatccctgcttttagcatagcattatcctggtcttataacctgcttccctgaaatctagcaaagagttcttggtatccccacggcaggtgacatggtttcaggggactcagagagacagggtctcactcagtcacctaggctggagtaaaatggtgtgatcaaggctcactgtagccttgaccttccaatctcaagcaatcctcccacttcagcctcttgagtagctgagagtagaggcaggcactaccacacccacgtggtttttaaatttttttttacagatgggatcccactatgttgcccaggctggtctccaactcctgggctcaaatggttctcctgcttcagcctcccaaagtgctggaattacaggcgtgagccaccatgcctggccttgaatttaatgttttacttttattatgatgtgtacgattaaatgttggcaaagacgctttatcatatttggacatttttcctatattccaatttcactttttttttaaatattggctgatttttgtcaaatattttcagctcttaactatgtgtttataacataactgattaatttgggttaacaaggcacctgaaacaggaaatatttttatatgaaatgcacaatcctagtcttgtatttatatcagctaaaccttagttgaatatggtgaattacattatttaaactcttttaccttcaattcagtgtaattttactcatttttaataattaaactaataactaaaatgtatttatacagcatatgtattatctttgtcaacctgtgacattagcctaatgatggattggtatttttctgtaggctgtgaacatttgcattgcattggacatttctgttctttgaaacttaactaaaattctcaaaagaatcataaggtagttataacttatttactaatgggcatttctaaacaacttcctgatggaggatattgttattactgtatgtctcagtattctacatttttaaaaattaactattttttgaatattacccattttctctaaatttccaaatattttagtctttattctattgtgattatatatcccttcttctgacagacatttctttattttggttgaattattctgtacttattaggtatttgtctattttatttatctattcaggtcacttttaatttcaatagttaaaaatccattaattttactgtttagctgaattaattgcattctcctacttttatgtttcatatttttgtgcttcatttgtttcaatcttttatttttcttgttaaaaggaatccattattattcacattatcattgacaactgtgagaatctgcagaaaaaaacaatatggaactacaacttcacgttcttgagaaaagcttgcagtgtaagatgcgtttgtttgtggtgcctgaggaagagaggttggtgaaattgcacttggactcagtgaatcggaaatagttttaactctccagtggaacacactgtgaagttgtcaagtcccttgatttctcaacgataccaactagttcaataagcaaagagagtatgcttgtgcctacttgttgcccaatgaaagaatcaaataatttcactgattccagcagcagaaaaagagagttggtagtgctgagctgctgaaggttcattactgcttagccttgagaatggaggccccacttggtactcttcataagagatgccccaactcgtcaaaggaattatggtaatctccttactttctgttgcacattcttccctctgctaatctcagtacactcatactaactttcttgtctgttaagtgatctcacatgttttgaaaccaagttcagataaactcacaagtgggttaaggggccagaatagtttaaaagaaatacaattacttcattatctcacttacatgtgaactttaaaatgttgaccttataaaagtagagaccagaatagtggttaccagaggctggggggtaggggcatgggaggtgttgatcaaaggtacaaaatttcagttagggaagaggaataagattttgagatctactgtacagaatggtgacaatagttaataataatatattgtatatttcaaaattactgaaaaagtagattttaaatgtcctcactacaaaaaatgataagtataagaggtgatagatatgttacttagcttgatataatcattaaatgatgaatatatatcaaaacatcaagtacaattactaatcaagtaatttaaaaaaaaaattaaaggaaagacaggcagaaggaattattattgctgtgttgatgaaacagaatgaacaaaagataaattttgtttccggaatttaaaaatgagagtttcttaatttaaaaaatgtgataatgtaagacaagacttggaaaggcaaataaaggtaacattttacagaaataataaaaaatgcaacgctataaaataactaataatatcccatgaaatacacagaaaatattccaaaagttcaagcagaactcaaagaaacagatgagatcagagagagagagagacagagacagagagagagagagagagaaagagaatgttagaataggagcataacagtgagaaataagatctaattattcatgttatatttaactgcttgctcaatcttagaaagtgcaataaaaaatttcagaaatgctaacctaaattctgcaaaaatcttcctaactagactttaatatttgtttaaaagtgtgtttgttttgagcttgaaggtatatagtccaaatgtagtcctcatgctttagctgggttagttcattagccatttcagggtgatcatattatttatttgaatttagtttggttcatctatttctgtttgaattttatttatggtacctttgccataattattgattatttttgttctctcacactctctcatacgtgaaatatttacatggttccaattatcagaagcataccataatgtatattcagagaactgacatgttacccccttcattctattattttcactatgttcccatccacctctgctttctggcttagtattcccacttttgattttagaggagccaccagaatgttttattatctcctcccatttttaaacacaacatagagtatagtttttttatacttttattttacctaaaaatagcctgctacatattataattatatatacaattataatataatcatactctattaacttaaaattttctttttttacagttacatagtactctgtgtctgcatacatttctgatttagtcaatctcctttgttttgacatttagctaattttaactataatattttaaattatacatttaattggacatttagctaattttaaactataatattttaaatagttaaaatagctaattttaactatttaaaatattatagttaaaaattagctaaatgtccaaacacgagggctcacgcctgtaatcccagcactttgggaggccaaggcaggtggatcatgaggttaggagatcgagaccatcctgactgacatggtgaaaccctgtctctactaaaaatacaaaaaattagcagggcgtggtggcacgcgtctgtagtcccagctactcaggaggctgagtcaggagaatcatttgaacccaggaggtggaggctgcagtgagccagagctcaccactgcactctggcctgggtgacagagtgagactctgtctaaaaaaaagaaaagaaaaaaaaaaagaaaattataattattgcatacacacacacacacacacacacacacacacacatatatcctatcttctgcttaaatttgtgatatcctatcttttgcttagatttgtggaagtgaaattgcttagccgtaagttactatgtagattttttggataaaaccaaaaatccttctttaggaatgtgcatttcctcagaagttcatgggagtgcattttccacatatcctcaccaaagagtgctgtaactcctccatcagcctgtctgtctctctctctcatctttctatctaaacttggctaaaatgacataaaagaaataatatctcagtttatattgataattcccttataataagaaaagttaaataaatgttcatatgtctaagagcttttgacatattcttgtgagttgtcagtttacatctctgcccttatgtttctatcaaatttttagtcttttcctcccaatttgtattaattaaaaaagtcttttattgttaaaataatgttgcaaatattttctcccagtttttcaattgtattttgatgtttctatatggtgtttttgctttgcaaagtttttctttctcttttttttttttttttggatgtagtcaaatgttccactaatttttttcattacctctgaaattttattcagacttagaagaattttacctacatagggttatatagaaattcatctctgttttatctcatcctgaaatgttttgatttctttaaaaaagtaaatactacatttattttaattattattttatataatgtgagaagggatttaattatgtctttttcaaaatggcaaactgattgattgattgatcccagagctatgcattacaaatctcctcatcacctcagtgttttaagattctacctttatcataaactaaagtttattttttacttgcatttatttctattatataactacttctttatcctatttcactgtatgtctgcatgcaccaatgcacagttttaattgtaaggtttttatatagtatgtttagtatcgggtaaagctaatttcttcccctatactacagctttctttttagtatttccaagttaattttgtatatttacttgtgtatttttgtacattttgtatacttttatatgtttatatttcttttgtatattttttatatttattttgtatgtttatttttacatgtaatttcagtatcaacttgtctaattatgtaaagaaacttattaacatagagattgcagccaaattataaattaacttatagggagctaagctgtattctataaagtttaagcacctcacacaaaagtaaaagacttcttcccattttaataattttaattttatatttttcaggccttttaaatttttttcatgtagattttacacatttcttcttacacttatctcttagtattttatagttattgttgaatattgattttatgtgttattatgttacctgtgtaactatgttacctgtgttacctgtgttatgttacctgtgtaactatgttacatgtgttacttgtgtatatgtattagatatgctattttaatgtttactgtactgttgaattgttttattttaatttagttttattactgaatctctacggttttctagttacaaaaccttatcatctacaaatataaatagctttcctttttgtttctgattcttatgtctctaaatgattcattttgtctaactgaattggctaacctctactattaagttgaacattagtaagaagagtgcaatacattctttaaaatcttattggaaatacaagtagtgtttctgaattaagtaaaatactgattctaggactaagattatataaaattcccatatcatgttaagaaagtaaacatcaattaacaattttgtactttttttcatctctcaggaataaatcatacattttgtaaaggactttccatcttctgtagaggaaaaatagctggtttttacttttagatgtatgaatatggtgtgcagaaagagttaacatatagcagacctgatttctatccttcgaaaggcctgattaaaagattaggcttggctgatgctgagaacttagattttggaaggattaccatcactctgatgggtaagaatggctcactgtgcctaaactgcttgtacaaaaaatgtagtttatgctaacctttttctttccttctaggagtctggaattttgataggtgctaggcagaaggtgcctcctgactatcccctaatagaaaccctaggcactaaatccctaatgagcttccctggtggacagcatttcatgtatgttgtccaaagttgttgctgagggaattaagcacagcccatatgattccacagggaaaggactcctagaaactttcatacttgtttttcactggacattgccgcatatgccttttccctttacttatatgctttgcatccttttactgtaatatatgatagccatgaataagactatgagtcctcctagcaaatcatcaaaccagaagattcatatggtttttatatcaatgaatttcctaatattgtatcaatatcatattcccagaataaatcacacttgatcaaaatgtatcagtttcttaatgatgtgttatattgttactaatatttttacatttcaatcaatattaataactgatatttgtctataattttcttttctaactgtattaggtttaggtataaatgtcatacttactttacaaaaagtattagattttccttaattttttgaaattttcttttttataaggtgcaaaaattttcaaaatcattgggactatccaggctttgaaattttgatacaagtcttccttgaaatcatctgggcttaatgattgattttgaggaagtgtcttgataaatttttcttttcctgatagagaaattagcttatttaaattttttacatatagtagggcctatttgggcaaattatatttctgtaggaaattatcattatatctttcaaatatataacagagagattgtaggattttttaaatgcatcatatgtcatgtcaatggttacttcctccttgtccttttattatacatatacctcagttaaggtagctagtaattggtctctcttgaaaattttttaccaaaaaatattatttttatttagtaattatgtgtttctcaatttagataaattgataaagcaaatattgtttattttttgctttattgttcctttattttttctgtttgtttttcttatcttgtttaacatgaaaatttcattcatttataatttgtatttttattaataaaagggtttagggctataaaactttttctggctacattcttgaatgtattacaggtgtcctgatatagaatacctccattatccatgatttttattaaaaaacacttttggattgtattttacctttaacccaagagtttaatttaaaaagggaaagaaaaatgatagaagtaggccaggcacagtggctcacacctggaattccagcactttggaagctgaggcaagaggatacttgagcacaggagttacaaactgccctgggcaacatagtgagactctgtttccacaaaccagttttaaaagttagccaactaatttggaaagatggcttgagcctgagaggtcaaggctatagtgagccatgactgtgccactgcactgcagcctagaagacagagtgagaccctatcttaaaaaatcatagaagtaataatatcataattatacacaattaaactacattgcaaataccaaaaattttacttgttttaaatttctacactaatcatgtacagctgtaacagttgtacagtaaacagctgtatatagccttcacttctcactagacatcttatcaaaaaagaacttaaaatttatgggaaaaccttgcactttgtgttagaaacttagtttcttggctttcttattcctatctgatggagggcaaagaacttcactagtttgcaggctacgcagagacaaattagaaaagaaacataaaacagaaatattttgtgtatagcacattgcccaaagatgagataaattggtctaaaaatgatatggtgcaatggagacatttaagagcttgttagcaattcctacaggtcccaagaggttcaaacagttcagaaacagaacagaacatgattcagtatattttcagagaattcaaaagtttttgtaaagctcactcaggaaatcttcagggaaaaacaaactttgctcctctttttatttggtaactttctatattctcagaataagcttgaaaaccattttacgttggctccaatatcccacaaatctggcaacagtgacaggagtcatgtcattctgacagttggacctgactaaactaagttagtggccaccagtgtctgtcaattttaatgatggtaggcagatttcccaaagtggtaatcactctgaacgtggtttattttttatttttttaaaaattaattaattaatcaattaatttttgcctgtttttggcacttctagcaagtattctcttagtattctttgtattcctactcttcctctttgcaaattgcctatatgcaatcatcaagtattttaatgataattcctgtctttatttccgttactctattctctccttgtcagtgactttccttccaatatcacgcacttactccatacagaccgtttcaaaacttttccattctccattccctccagcttcccttcagtaattggtcagttaataagcctttctgatcaagtcaccatctctcactggaattgttgcaatagtctcttgactggcctttctgatttttgcccttgccctctacagtttattcctaacaagacaactagtgtgacaaagcaatcaatcaatcagtcaatattgtccttcctatgatgaaatgcttctattccaatggcttctgttgtctctaagagttaaagagaaattattaaaatagctattaatgcccacattctagtcctttaatatattatattaatatattatatattaaatgttatatatataattaattatatataatataattatatgtattatttatatattaatataaattaatataatataattatatattatattaatataattatatattaaatatattatattaaatattaaatatattatattatattgattatataattattataaattaattatatataattattataaattaattatatataattattataaattaattatatataattattataaattaattatatataattattataaattaattatatataatataattatatatataaagtccttatatattaaatattatatatttataatattatatatataatatttatatttccctcatcctttatagcatttcacactacctgtggcttcactggagttattgcattgaatttgctgccttttacttaagtcaaactttttgctcacagtgaaaggaatagagaaagatgtagggagaccccctgaaactattgctacagaataaaagatgaaatgctcctaattattgtaaatacaaaattgcatgcagtattgtgtaaagacaatgccaggttggactgccagaatgagccaacagcgcgtgacgtgcttccccctgcagagagcctatgaatggacgtgcggtcagggaggtttcacatcaccaagattcctatcccagaaaagcagatgttcatagctctaggaatggaatgcgacccttgtggagagcctataaacggatgcatggggcgggggggtgcctgtccatatggataagatagggctataaacgtcctcatcttgccatggctcttctacacctctttagggttaaggcatactcctttctgagaatttctcgtctaaccagttgtctatcttcacgtcctatttccatggattgtttgtaaccagcttttgttgcaactgttactgctgattaatatcttgctaatcataggttatggaaagattgtgtttctgttttaaggctctgttagaaattactaacacacacactatattgtaaattcttatctctgtatactgtacttctccatacaaatgtactgtacttctatatacaaatgttatgttaaagaattacttcatccccatgtgaccatctcacctcataatcaaatgaccctaaatccctcactaacctacccctgccctcactaaacttaataataaatgctggtatatccagtgcattgttggcaccgtgggaccagaaggtagtgacccccctggacccagctttcactatcttgtgtgtgtctattatttctcaacctgccgatccgcctaagaacaaagagagagccccgttgcattgcaggctgctggccagatcccacaatacatacacagattccaaaatgcattcttaactcttaaaagattttggttacttatcactattctgtctacttttctgtaattgagaaaagtatttgtcaactcattttttctctctgtgacagctcagtcatttacaaagttttattttatactttactccttccttcaatttgtgctaaaacattgtgaaaattaacatttctttggaacacaactttttcattataaattaaatactgatataattgcaaagtaaacaaatgaatttccataaagctaatttatctttatattttccatacttattacttcaaattcttgttacattttcaattttgtttgaaatatcatatggtattttaaattgaaatttactaattattttttagccagtggataaagagaaattaaaaatttgaacaaattaattcaatttttacttcacttctcatttgaaggtcttcccagtaacctaccaaaagaagtctctctcttttttttttttttttttagcttagattctaatcttcattctgcctattctggctaaacttctcaactctggctatttttcaattataccccaatccctaagccatgtaactcttcgaggtttttgtttgttttttcaactgctcattaagacgtcctacaccttagcaaaaagatcacacatatttcttcaatgctttggagccatagtcatgtactcaaaatttattttatctctactcccacccttcctccacccaaacttatccttgggttttcactgattagtgctttcaagcctgcctgccttagttcatgtagctcctcctctggtactgggataaacacttgtattaccattttaaaggctatcattactctttacctgtgaagagtagaacatgaagaaatctactttattcagatattctccagattcctaaagattagagatcatttctcattctcctaggagtactcacttcaggaagcaaccagataaaaggtaaggtacaaatactctttctaattgtttgtattttacaaatctaatcttatgaatatatttgtcttgactagaagtttgcaatcaaatttaattagaattaagaatttctttggtttcatctcagtaaaaaaaattagtgtaaatagggggagaaaaataagatttttttgccgcattttttagttaacttctaagataaaaactttgaaataactccctacttacttcctttcttaagagttccaaagccattatattcacatttaaatcctattattcgataaatgtgtatgtgtaaatattatatgtatgtgtgcatatatctatgtatcagatacatatatatgacattgtacgccaagccatgtttctgtttgaagactgtatgtttatgtatggttacaggaatatttttacttcatgtacttttttagagctgaatcatttcctttctatgaaaaagcatggttaacacttaagaacaaggcagaaagcatttcctttaaatatttaaactacttgttctaaaaataatctattgaagaattatttctaccccacccaatcatttaaactaagaaacaagactaacaatttagagagattattaattatttaatttctatttggaaaagactatcataactttgattcaatattctacttgcataggaaatgattactatgcaaacttgattttgatttaattaatgtaggatttttagatttgagctactcgattctgatacgattctttgttttcattttcaaagccttagtatcctcaatgcttatcaagtttcataatgaaacttagtaatgataaatgtttcattttataaagttcatttcaaatgtctaaggttttatcatcatctcactgtttatctttagaaatatctcgagtgtcatgttgcttgaaaagaagttaaataagtatatatcagatttactttatgcaaatatttctttcagccaaaagtctttctatcctggtcaaacttacaatcatgacaattattttctttgtatctcaaaattaaaagtttactattatattaccaataaagatagaggcaactaaataaagatacttaattagtaccagctagttagttgaaagaatgtgtcataataaatgcccagattttctcaaaatccagaatgtcaaaccctgtattaggatatggaagttaagatctcagagatatgatttctttgtgcttatttttttctatcaaaactagtttatagttgtaattattttcttttctttcagaaatatgattaatgaggtagaaaaaagaacggtagtttagaaatatctcaggcagctccgaccaatagaaccttctgtgatgaggaaaacactctaaatctgtccaattgggttaccattagctacatgtggcaatgggacatctgaaatgtgatacagcacttgagaaactaaatttgcaattttatgtaatattaattaatttaaatttatacatggcatgtgttagtggctacattaaacagtttatgtctaagttattaaaattattaaatcttttcatttacaaatacttttgatttgaagaaaagtggctttacaaataaagatcagcagatgagtgctaattaggaatgactgttgtcctaatatgtacccttttctaccatcataaaaaatcaacaaagtcctatttttcacatggcacaggatgtcatctttatacaatccaagaaaaacaatggtttagattgttctaaaaagataagcaataactaattatacatatgaattaaataagtaaattattaattttatatatatatattttttgagacagagtttctctcttgttgctcaggctgcggtgcaatggctcaatctcggctctccacaacctctgcctcctgggttcaaactattctcctacctccgcctcccgagtagctgggattacaggcatgcaccaccatgcctggctaatgttgtattttgagtagagacggggtttatccatgttggtcaggctggtcttgaactccagacctcaggtgatctgccagcctcggcctcccaaagtgctgggattataggtgtgagccaccgtgcccggccaatgtatattctttacaagcaaaaaaataaggaaatactgaggtgaaaagaaaaaagatgctattgaaatttcatacttaaattcaaatccatcagggaatagtctatggggagaatgaagcttcaagagttgaaagagtatgaatcagaaatgatttagaaaaaggatattccaggcgtaatgtgtatctttttacagaaaggtagatgtatgtttagttgacaaattacattttcctaagaagacagtggatttatctgagtagtaacaaaaggaggaaataaaacagttgaggattttagaaattgattcttcatcctattctgatttctgagtcttcaggtgattctttcaaatatatattagaaaattaaaaggacttttaaacctggttgttttgaagtctctcagagctgtagagatgtattcagataaatgtttttccatgagtgctactctgatccaggctctaccctaaaaggaagaagaaagaatcaaatataaaaaaaattaaaaaaatattttgccactgtgccatcaaaaatattttaatatgtaaagaacagccattcaaaatatacatttgataacgactaagaaaaatgtttaagtagataaaaataggtaaattttgattatctagagtatatattttgtttctctgaatatgtagggtacagcatgtcaaactaactttctatcctctgaagggacagaacgttaatactgagttacttgggttagagacttcttttgaattacatgatgtaattatataagatataactctctacttcaataccgcaaatcaacaaactaattaaaatgagccctctcataaatcatgaaaaacagagttctctctcattaatgaaaataatcagtctaacatcacttatttaagaaaattttcaatcctatcctttcagtgggaggttttatacaactagtaataaaatccaaatttcattatatataatgaatccaaatcatgagctattgaatttgggtgtccccagagaattctaaaagctattaccaaatatttaaactagaaaaacaaacaacaacaacaaaaaacagaagccagcatattctagcacagaatcacagaaacagacaattcttactaaaagtaattaattttcttacggactttctatttagaactaaagaatataagagatcatatttgtagtaagaacttcataaatcaattattttcattttcactcaactctttcacaaatctctaaaaaacttcatgaagactaaatacatagaaaattgaaacactgcaatggcagtataaaggtgacactaatcaatatatatgattgtcaactaccagaaagggaaaaaacatactctagaaatgtctgcaagtctagtgaattcaccaaactatgggataggaaaggtcacaaaggagtcaatataggcagtagttaaaacctgtcaggctagaagcagcagtactactgggaagaaaatgaatgataagggtatggttagcatgcgagtcaatttacctaccaagctcaacatcccttttagcttgccctgtgctcagtccattgttccttctgagtaagcctaggggaacctgcagttagctgtagctgattggaacagaggaaggaagaggcaagctactggctggccagtagtctcaaaattctctcttgaaatttcatctaaaagacacagaaactagtagcggtgtcttgaatcaaaaggctacaatttcaccaatgaagtcaagaaagttgctctccagagacaattcagcacaggagactatgctgttactagataagaaatgtagggaaaatcttgcttcctgatttattaatttcaatccatacaaaactgggctgcatttagtttcctgtatttgaatgtgtatggaatcctgttatattataaggataagttgtgctaattttaatggtttcttttctttaacaaaggaacttttaatagaacagaagacaaacagacttataaagattgtttgggccaagaagtagaacaacttaaaaactagattaaggaatttagatgttttcagttgataagggtgatccataaaatgaaggtttatgaaaaaataagtaaaagtaatcaagatttaaaaatgtaattaatatgtgctaagccctgttttagagctttatatacattaagaagataagtaatcctcccaataattgtgtgagttaggttacaatactatccctactttatgcacaaatgaaaaacagacacaattagaagagaagaaattcattttaccaccaccaaactgaccagcctaattatgttaatacctatacactccaccttctttcctgtttcagggaatgagctgtcagcatttaagagagtttaaaaaaagaaaaaaaagcacagagtgggaaaattaaaattaaattataaatatctgacagacaactcttatccataaaatacaattaactcttaaaaacccataagaagaaaacaatttaaaaatgggcttgcaatgggatgatttttaactatagattacatttctttagcaaaaatatcacatatccagatatttccatccttttcgtgttagttttggtgagtaattttttaaaagaaatttcccatttcttctaaattttcaaatttatataatagatgtgaagttattcataatatcctcttttaggatttttaatgtctgtgagatatacacacttggcctcttcttcattcctcatatcggtaatttatattatcttttgatcttcttgaatagtcttgctagaagcttatcaactgcattaatctttttaaaaacacttttagtttggttgattttcttatatatttgtttcaattttattgaatttttactgttatttctttccttctactttgactttaatgtatttcttttttcatagcttcttgagatgaaagttttggtaaccaatttccagcctctattcttttttaaaatacacaaaagcctatttaagcctattcctctaagcacaagtttttatatgttatattttcattatcagtactttccaaatatttttcaatttcaattgtgatttattttttcatccatgggttatttagaagttctcctcagtttcactcatataaacattttctagtcatttttccatatttttgattctagcttaattccactgtggttagagaacatactttacacaatttcaatcctctgcaattcactgagataaactatggctcagaaaatggtcaatttaatataactccactgggtgtatgataagaatgtatattttgcagtatttattttattttattttatttatttattttattttattttatgacagggtcttgctctatcacccaggctggagtgcagtggtgcgatctaagctcactgcaacctctgcctcacaagctcaagtgaccctcccacctcagcctcctgagtagctggggctacaggtgcgtgccaccacacctggctaatttttgtattttttgtggagactgggtttcgccatgttgcccagaatggtcttgaaatcctgagctcaagtgatctgctcaccttggtctcccaaagtgctgggattaaaggccatcacacccggcctttgaattttaacatattccaataatctagtaattttatgtatttcagttgtctagtaatattcatatttatttccattttcttgaacctattataattgcttaaaagtccaaagtctctatcacccataggtttgtttcaattgtctttttcatttttcttgatttcagtcattcaatcttgtttcttgatgtgcctgatgattttttactgtatactagacattctgtatgaaaatttatagcaactctgaggctacctttctccagagtagatttttcttttggcagtcagtcagagtactagaaaatcacctcacaatttaggggactacttttaggcctttttttgtattaatcttctgaatttcccttactccaaagatattgtctttcaggggtctcaagtaaaaacctggagtgtttacagttccccttcaccttgcttgcccttgaactctaacctctatctctccagaactagactgtgaaatcatcaatcagcagttttacctcttccctgctgctttcagctttgtttatgggactttgctttgagctacagatgacttagagttggcaacaaccccataggaaaactgcatgcacaactccaggcacatttgtctgttgttcagtggcagttccaagctccaacttctgtttgtctgcccaaggaaataaaaatctccacctccacaactttctgcttagtctctatacctaggatgtgaatagacaaacaactttaggctaaagcaaagatggatgtgcggctcagctcgtgtaatatccatctctccaggactgtggccactcaagttctcatgccttggttgctcccttatatcttaaatttgttacttcacatattttattcaacttttatagttgttctcagcagtaggtccctctgatacaagatattctgttatcactggaacctgattgttttcttacctttgggatcgactctgttttagattccaattacacccttctcaataaattctctgcttctactcctcccttcaatttattatccctacagcaccaagctgatcttataaaatggaaatcagattacagtattctatcacttaaaaaaaaaactctcaagtagctcccccactgcactgagaataatatctgacttttaatcatggccatatcttgtattcttcagcttgcttagcctggtcagtatttgcacagcaaatttattggatggaaagatgcatggatatgtggatggctgatgtaactagcatattctgaaactggtctaattaaacaatgaaggaatgtacaggataagcaaccagaaacctaagaaagccaaatctagctaaaaacaagaactgctattaaaaacaaagaaaatggggggacaatccctcacaaaatatacaagaagacaggaagaactcaggaacaatacaaagctcatattttggggccaagaaaatgaaaaagcaagaaggagaagggatttcttgaacttgaaatcagttggaatatcatgaaaacccaatgtaaatatctgcaaggttagtaacagtggtaactaaagattcaattgggagtggtttttttcagggatcatataatatgtttataagagcatatgacccaagagcagatgcggaagatgggtgagttcagaaaagaatgagataagtcagtgcctgctgagataaagtcatttttctaagagtgctgattctagtgtgaaacctaagtaatttatgtaataaaagtctcatgttccataacacctgcatatgacagaaataatagctgcaaaagtactgaagacacaaagattacaaacatgatcctcaactcaaatattttattctattgttaggctatgtttaagtcttatggctaaactagtcacagacagcagagaaagggaatggttagcatttcattgtttttttttgttgttgttgttttgtttgttttcttagatggagtctcgctctgttgcccaggctgcagtgcaatggcatgatctcggctcactgcaacctctgcctcctgggttcaagcgattctcctgcctcagcctcccaagtagctgggattacaggcatgcgctaccactcctggctaatttttcatattttaagtagagacagggttttgccatgttagccaggctagtctggaactgctgacctcaggtgatccacctgcctcagcctcccaaagtgttgggattacaggcatgagccaccacgcctggcccattgatcttaacctagacaaaagtatgagattgtccatggtgacaagcttctacaatatgaatctaagtggtatcaggacagataattgtgatataattgtgatacaagtgtacttgtatactgtatactgttcaccaggcaaatttagtgcttctggtctgaaatatcttttcacatgtgtcaaggcaaaatgacactatgctagtagtcattcaagattgcagctgtaagcctcaataaacctaccatctgaggcatttgtttaatccttcaatccagagacgtgagatgtgacttactgagtagattaagtaaactgctcttttcattgcaatgaataaagagaggtaatctttctccacagactcttcccagcataactaggcaactcaaataattctctttccccactaaatggaatctgtttgaggcctgagcaaaacaaagatataaatgcaggatttggaacatgattgttctgtggtgttttgattctcaataccagtacttcacagaataaatattaactctctgctagataacatattgctgtgcagggattagttccaagagccttgttaagagagttggtcagctagggtttgggtttctttggtccacccaggtccaaatgctacatttctaaactttgttaacttcttaattactttttgtattttgggatatgctagttttataaatatatcctcccctctattgaaagggtttagaatacactgttatgttcctctctcctacttttgatttgaaaatgagaatgtttatgtagcatctagaatactttttatagatttgattcattcaaattacagctaatctttaaccttagcctaaaccttagccaaaagaaatgtagatataattcttaagccataaagaaaacataaaaggaaaactgaggctgggtgctgtggctcatgcctataatcccagcactttgcgaggctgaggcaggcggatcacttgaactcaggagttcgagaccagcctggccaatatggtgaaaccctgtatctactaaaaatacaaaaattagccaggtgtggtggcacatgcctgtagtcccagctactcaggaggttgaggcaggagaattgcttgagcctgggaggtggaggttgcagtgagctgagatcgtacctttgcactccagcctgggcgacagaactagactgtctcaaaaaaaaaaaaaaaaaaaaaaaaaaccaaaaaaaaaaaaaaaaaaaaaaaaaaagaaaaaactgataaagctcacctaagatgcaaaggggaattcacactgcatattttaaaaatctatagttcaaaaattaaaaagtaagtaaatgaattaaaaattcagtagtttgaggaaacagaggtcaaaggacaatagttgggacaaaaaagacatctgttaatatgtaataacaataggatttaaatatctgagggaaaaatttaattaaaaaaagaaaatctataattaatttacaaatgaagaaatttactggcttaaatacgtgagacagagaagaaaactgatccaacctgagagagttgaaagatattgaagcaggaagttccttgttgctacaaccccttggttgaagattggcaggagggagcagtggctttaacaagtgaactttatagttatagtctcaaaaaggtgacaaaaatcatagctattaactgtatccaaaagtgtactttcatattaaggagctaaaaatgttttacctgtgtttctaattatgtcactacatttaaacattatagattttggtttttaaaacatatactcagttcgtgcttacaaaatatttaatttgaacatatcttcatcagttttgctgaacaaaaattttccaaaagaaaaaaaaaatcctaaataaaaaggatgcaagaacaaaaaacttggaaattataatttggaaagataattgttatactttcggttattacatagacacataatttataattctataatcgtgaaataatgaattatgtcttcatcttaaaactgtaaatatcaattttcaatctttattttctacttaatgtttcattctgtaatttctaaatgtcaaaataataaagctactctgacaattcaataaaaataaatacaactactacattaaagctgatacctgagttgagttagttatttgatacctgagttgagtgagttagttgagttagttaggtatactcaaccttctgttgagtataccttttccaaaatgcttgggacaagagtatttcagattttgagtattttctgattttggaatatttgcattaaatggtccatttagcattttctttgaacatcatggtgatgctcaaaaagttttagttttgagatcatttgagatttcacattttcagttttgggatgttcgatccatttgacttaatagttcagacattttataatcctaaaaattactgaggaccccaaggaagttttatgtaggctatatctaccaaatttactgtatcacaagtcaaaactggaaacttaaatattaggtaattcaaaaataatgagttggtcatggtgactcaacgcctgtaatccagcacttcgggaggctgcagcagaaagactgctcgaagccaggatttctagactagcctgggcaacaaagagagatattatctctacaaaaaatttaaaacatttgccaggcatggtggcatgcccctgtagtcccagctactcaggaagctgaggttggaggatcacttgagcctaggggttctagcctgcagtgggctatgatagtaccactgtactccaacctgggcaacagagcaagaccctgtccctaaaaaataaaataaaataaaataaaataaaacaataaacccattacctgttaacataaataacacatttttatgaaaaataactatttttcctaaaaaaaaattagtgagaaaagtatctctgttttttttttttttttttttttttttttttgagacagagtctcgctcttttgcccaggctggagtgcagtggcgcgatctctgctcactgcaagctccgcctcctgggttcacgccattctcctgcctcagcctcccaagtagctgggattacaggtgcccaccaccacgcctggctaattttttatattttcagtagagacggggtttcaccatgttagccaggatggtctcgatctcctgacctcgtgatccgcctgcctcggcctcccaaagtgctgggattacaggcgtgagccaccgcgcccggccagtatctctgttttacatttttttctaatctctttagtgtctttacaagataattagatatctgcttctgcattccatctgtaacaatgtgttgttttggttgaagtatatgaagaaaatctagcttcacacagatatatggttggaaagggaatcttttaatagtcttttcagataagtgtagatattttcttttgttctagatcaaaactcactaaatggtaagtttctgtaatcatattaatgactttttcatactatagtacattaaatctactgacctaccttgcactttgaattgatctttttacccatacatgattttgtaattccacgaactgatcatttggaaaatacaagttatgcagttccatcaaatgttgacacatttcattaaataatttaaaaatacatttgttgatatcaacatcaatgttttaaaaaagcttttctatattgggaagctatgaagcttaagatggtgaacacaagtttctaaaattctagtttttacttaaaagctttaatttcaccattggcaacaaatactgtcagctgtttccttgaagtaataggctcacttctttcttctttttttgagaaaatatctgtcaaatgcctaagtccaaaaaattatgtttataagtttttcttttcagtaaaatcatattacattaaaaagtatctagttcagctcacaattcaaagaattgtacaagtgtttttcttgaagcaaccatcatatttcagtatgctgcagaaatgctttatgcatacttcccattttattactcaggatattaaaaagacagatcctcaaagttgagatttaataagaattaatgtttcccgcaccatcatggtcattcttaagttgaaactgcctttaaaagaaaatactgagtgcatggtggggaagaactcaagactgcttgcacagtttgatgtcactgcattaattcgtgctaaggttccaacagttttatccaccattgtgtctgcattggcagtgcaaatatcaacacagcgaaaaggcaaataacaggttgatattatataaaaatatttttgacattttgtacccattaaagaaagggtcttggacatcttcagggttctgctgaacattatttgagagccactagtttagataattcaagaaatgtagaaacatcacagaacaggacgtattttattatgcttcttaagaaaaggaaattcatagtaagtagcttcacaccttcctgctattccaaatacatgcaatgaaaaaaaaaatagaaacgagtctctgaccaatgtcttaccttagctctagaagaactgacattttccatattttcaatgctgcagatacaattctgtgaaactttccggcaagccactctgatatagtcccagaagctacgaggactttcataaccaaaccaggttacttgaccttcaggagacaaattgcgatataaaattttaaaaagtaaaataaaactagacttgaaaatgcaagaacaataaaattctgaaaaataaaggtaatatagtgaactataatggcaagggcaccaccaatctaggtgtcaaaaagcctcaaatctagtcctattctatctttaactagtggtgttagtttggaaaatttacttaatttacttaatgagtctggatcatagtcttaacaataaaatcaaactaaatgaaagggactagacactagaaatatcttgccatttaacatcctatttgtctaatacagtcgcttaaatagcacacgggaaccttcctgcgcttctagttaagcattaataaatgtcaccaattgaattctaaacctttctctatttaaaaaaacagaaaaaaaaaccccaccaccataattcttttctcctcttcataaggatacttcaaaaaaggtatacaatgtgttgtttactttataaataaataaaatcaattagcatcctatattcactaataatgcataaccacctacccaaccattctcatctataaagctcccctttaactgtcatttgtttgctctcttccagttaagaactcatgaaaaacttgtaatctttcagatttggctaactatgtatccgttcatgaccaaatgttctattgtgcataggttatattagtattaatatttctatggttgggcatggtagctcatgcttgtaatctcagcactttggaaggccaaggtgggtggatcacctgaggccaggagttcgaggccagcctggccaacatggtgaaacctcatctctactaaaaatacaaaaactagctgggcatggtggtgtatgcccataatcccagctacttgagagaggctgaggcaggaggatcacttgaacacaagaggtgaaggttgcagtgagctgaggttgagccactgcaccccagcctgagtgacagagcaggactctgtaaaaaaaaagaattctatacaggactctgaatattagtctcacaggaaacattttctacactcagtatttttaagtggaatatgagagacatcttaatactttctttagttgtctagtatgactagtcttccctaggaaagttgtttaatcttcttgtagaaagatttgctttcatattttgaaataagtgcttttttcatcatgatttaattatttactttaaatcctcccttcctcagtaattacttctctacagcaacatcaagaagtgttcttgtcagcaagcaccattttaggaccaatgtctgagataatatctgagtggttccaaaccatggcagaacattagtgtaacttgactgcttttaaaaaatactcatgtctagcctccccacaaactgaataatcaaaatctttaggggaagatgtaagcatttgaatttttaaaaatcgccccctagtatttctagtgatgtacttattattaatcaaccaacagaaatcctacaagtcatgataggtaacttctattcattattcagggtgttttaaaggcctcttccagaaacccatgtatgatcccaacagctagtccctctgttggcacaggaccctgtgcttacttctcctcaaaagtatttctttacttgattatttcacatattaggcggtaagatcactaaggcaggaattttgtcttattttagatcaatctctaacacttgacacagtgcttacttggctcacagtaggcactcaataaatatttgttgaaaaattaaatttataaatcagcacaacacagataatcttaaatgcaatgaacacaaaaacttaaatttaaaaaaatccaattatctttttatagcaatagttttgataacagtctgctagtgtttgcatgatagattacaaacatcaaatattttgcacaaatatatttttctttatataaataaaaacaaatgcatctataaatctttattctaataactatataattcaatgtctctttaaaaataaaattttgcagccggtgcggtggctcacgcctgtaatcccagcactttgggaggccgaggtgggaggatcatgtggtcaggagaccatcctggctaacacggtgaaaccccctctctactaaaagtgcaaagaaattagccgggcatggtggcaggcacctgtagtcccagctactcgggaggctgaggcaggagaatggcgtgaacccgggaggtggagcttgcagtgagccgagatcgtgccactgcactccagcctgggtgacagagtgagacttcgtctcaaaaaaagcaataaaaaattaaaaataaaataaaattttgctacttacaaatagaaatctacagacttctccctcttaatctctctccatcactttcttctgctccctctcttcttttaactaaaaatttcctgatataatgcctcaatatagtttgtctctagggcacttttcatgtcatcaatttgttagccgtttggaggggaagcagggtgactggtggttaagaacatgggctttgagtccggtggacctgaactagatcactttctagctatgggatcttgaaaaaatgacttaggttcactttatgagtctgggcctcttctgtaaattgaaaataacgatagtacctactggatagtactgttgtaaggattagatgtgatcatgtatgtgcagcaagtagcaaagagtctagtgcatactaaattcaaaataagtgttaattattactactgttattactgtaatcatacaagcagttacagggaccaagctctccttgcatcacaaaatgaagtaggaatgagatgcaaagttaaattcttcacattacttgctttggaatctagagaaatcttccaaacttactccctaatccaactttactcccatcatcaaccattctaaagttacttcctcaaatgtttctaacttcaactcattttccttgacttctattatctgggatcattctataatttcaaaatgagagctacagctgccagacttccctcaagaaatgaagtactacacactggaaagaatcttaaggaaagagtatcaccaagattctgtggtgagtttaagtctctctaaaaagacaatatgggaaacagaagtcagagaaataggcaagggaaaatacaacattgtattagccaatggcaaccacctatagtggtaatccaaataggtaaccacagagaaagataaagcataggttgtccatgaacaagaagattttccgttttaaggaaatgtacaagggtccaggactttggcataggacatggtttgcttttctgtaatgttattttaaatcttctctttagtttcaggtggctgaagaaaataacttgtaggatgtttcaaagtagagctgttgaaaaccaaagagtatttaaaaagccctgttttggaggagagaaaacagagacagaaaaactagaaaactagagttaggttaagcagagaagggtgggcactaaatccttggaactcctgctataggtagggcacactatccacaaggacttttacccaaaagataatgaaaagatttcccagattacaaactgagaaactaagcaattgacaggacggcatatcatcatgactttcagggccataaatcaaccaccaagatcttcataacacatttatctgctctacaaattagatgtgaggatgacttggcttgattctggcttccttccttttccatgtgcatcacttccaaagtgaagctcttaattcaagacactgaatttttcacattcagaaagatattcttcaagagaaggtagattctcttgctagaacctccaaacaagctttcatgtaaattgcctgtatatcctaggatttcatctaaataattaatttctgcatctacagaaaggtttaatttagttcaatataatagatgtgttcaatgagttatctgcgatattatttgaacatcacttttatgtaaatacagattaactgctagtaaaagtctataacctgtatttaacaggaaaatttaaaaacaaagttacaagctactcatgcctttaaaaataaatattgaagtaataaataaccactcctcaaatactttgacttcctttaaaaataaccacaaaagacaatcatatagcaagaaactgactactctatatcttgaagaaatgttattccaaagatgagatatgctgtcattaacagaattccctttttaaagttctcaatgaatataggtatacaatatgctttcaattataagtattcttggaagttaacattttcccaatgttaaacaagcttttaaaaacatattcccatcccatcaatccaactctcttcatctttaggcacagaaacaaatggtgaaaagtttgctagactaaaagacaatctgttactgaccagctatgtgattatctttccaactaaattgcctcatctttaggacctaaaaattgcctgtgatctctagggtccaatgttactctaaaattactcttctatactctttaagtgagatatctatttacactttgcaatatgtctgtgttttgtttgtatcttatttcatggccagaataagaccttctaagaacagaaattaatttttctaaagtggttctctactaagcagtagctgacacaagatcttttcataatacaagaaaaatataaatgaatctgttaagtgacttaattccccatctttagtaatagtgcttagctatgtaaaaagtgaatgataaactgatttcacaaatgaaagttctgttagttaaaatatatcacctacttgacaatattaaagactattacctttgagctattattcatctagacaatcaacaaaagacaagataatcctaccacattttaataaaccactctgatgtcactgcaaaagctttcagatacttaaagaaaattggttcctttaaaaaacttgtggagttctcactttaaactttgtagcagcaatcccaagtttcttactgctaatttataaaagccagtttaatattatccactattttatcaaacagagaaaatttccatttctgtaaaagttcagaaacttttcctttaaaaaggtactattattagttgaggtttatatttattagaccatccagctttgaaggtaaaattatgacactgatccattttctaactaaaatcccaaattaatgttctaaaaaatagaacaagtataaacacttaaaaataattagttacactttaaattgaatctgaggaagtcagaatctacattagatactcaattgtacttacattgctagttctacatgctacttacaggacacttcaagtatatcatttaggcactaagaatcagttactcatctataaaatgtaactattatcctttggtattgacaatgtaatgtctagttcactagtaaggaatttatcacaaacatatacaaatatctaaagtatgtgtctatgccataacaattagtcaactcttaattttccaaaacaaaaagattaagatgaacaggttcagcaaaaatctgaatattgaatcaatttaataggcttttttatcccagtaattttactctctctgaaatggagaacaaacgttttgttttttcccttccaccagcattattaacataaggcttaaagtactggtggaatgaaatcgtacatgacggctgaagtccacacagagagctacacataaatgcgtactcctgaagaaatcaagtataatgtgtgtcagtagtgattaagactataggtacagaacataaaacagataaaattgcttgaaaggattaattgtgggaattagaattaaggaaatgacatttgttttttactttttctctttcgttctactatttaaaaataatgactatattgcttttctaagcaaaaaatacagaaagctagatcattaagtacaaaggtccagcagtgttttgcatatagcagaaactcaattaaagaaaaggtttgaataagtaaataaaggcatgcattctacctgggagaaaggaaactaagaagtacattcccactaatggttcaagaatgaaaaagcagttattgtttatggtgccacatctatgttttactgagactggaatattcatacagcttccctgagctgctacttcacacgtaatatttattattatacagcacttaaaaagtaaataggttattatattgtgtggatttacaagattttaattttaaaattagcataagcatacttgtgctctctggattaaaaaaaaaaaacaaaaacacacaaaaaagaaggctttacaaaacccatgcaatgtactaaaaaagatcacttaactgatacagccctcccccgaaagtcaattccatgctcccgtgcagctcagtggcgggagacatcaccagcatagagtaccttgaagaggtatttggagatgagccagccatctgcaactttgggaaatctctttaaaaaaaaaataacaacaacaacacacagatatttaagaaacctgccatcatgtttacagttccaaactgaatagcccaactaagatggctacatataattttgaagcagtaaacactacttttacctactaaataaatgaactctgttaagataaatatgagctacacttggtaagtaaatgaagctagttccttgtagcttattgtattggagaggctaaggtgtctgtaagtcaaaaatatgtgagcagaaattgtttcctgtttacttttacctccatcattctttctcagatgtaataaactgatgagtagaatagacctcaaagaagagcaacagcttgactgaacttgctggcgatgcacctcagaacttataagattggttaggaaaaaaaatcactcactttggaactatatggctcagaaaatttccaagtttaaaaataaatacacatttttaaatgttaacttttctaaaagttataaacaaatatattttgaaatgtagccattcattttttgcctaagaattgttaaaacttttatgttttcttccctgtagagagcagcacttagatattatataaaatgttggtcagtttaaccaatgttgactaaatgcctactctatcaaaaacactgttttatttgttacagcttctaactcttatttaacaatcaccaactgaaaaagtactagaaatttctgctatatttttcagaaattgctagtataacaatatgggaaaactccaaagccaaatttctgaaataacattcccaaaaaataacatttccttctctcatagtcaaacactgaaatctccaatagtacatggtcccacacctttccaaacacttagatcctttataaaaccaataaaagacaaacacatagagctagtaatgtgacatgaaaaatgaaaggaaggagatacatacagctgtgccacatctacacatctgccattcactctatcctcttacttccataacattttaaacaaatattaaatttggaaaaacatatccaaaaggatctataacttggtacgacagttaaagctcatattagaacataatgttcttgctataactacaacaaacaaaaatgaaatttctcaacattgaatgtaaatcagaatagaatgcttttcattgcaaataacattaattcctaatatttaaaccacatttactatctctgtcctaaaacaaagttctctatattatttgtgatttatagatctaaaaacttatcaaagtaaaaacaatttccatgaaaatctgacttaaagaaattttactacaaaaatgtaccaaataagcatatcatgaccagatttatggcacttcttaaccaaccccttatataaggtgggaaacaattactgaaaatatcacaaaactcaatttatagggtttttgtgtttgattgtttaagagacaggttctcactttgtcaccctggctggagctcagtgatgcattcatagctcgctgcaacctcaaattcttggactcaagcgatcctcctgccttcgccttgtgagtagctaagactacaggtgcgtgccaccaggctcaactaatgtttttatgtgttttttttgtagagaccagatcttgctatgttgctcaggctggtctcaaactcctgggctcaatggattatcctgccgtggtctcccaaagcattgggattacagttgtgagccaccatgcctggcctagataatgttggttatttttttaaaaagctgttagtatgctagcctctgtgccctgattttcattttggctgtgaaagaccatgggaaaattttcttaaatttttcacttatttgtaggatgtaattgctttaattataatttaatacgattaaaccattctagacaagttaaaagcaaccagaaatatctggaccaaacaacaatccactatattccaagttatctaatgtagtcaaatttcaacaactctcattttacagatgagaaaaggtaggcccagagacaaggctgccaagacccagcaatcggttttctctgtcacttcaagctgacctactccttaggagataggcaggacctgactgatggaggataattagtcagttgtatttcctggttggttagagttctcactgacaaccccagaaagaagggggaaaaacatgaggtagtgaaacatgtaatgggaaggaatataaatattttttatataaaacgtaaatccttaggaagtagaagtgctgctctttaaataaacaagcgtatgacaaagctcacattatttcaaagtggcccagggcttgtttgtagaaggggttcttatttgagatggaaacaaaaccttttgttataaaatatataatgttaaaagaaagtgaaacagtatttaacactatgtagcttagaaaaatacttgagacaataccaaagaaaccaggttcagaaagcattttgctcaagaacaaaatgcattcaaatacaacagtataattataccatatagttatttcaggagtaagtttctgaaatttcaggcaaaggcagaatcaactcagagatggatatgcaatagaagaatgcttctatactgaatactgaagacagacagcatttcctgacccaagaagtatgtacttttcaatatcaaataattgattcataattttattaatattgaaattagccctcacacagaaaagactattggccactgttttaaacaaataaattttccttgataagactgaatatgtttctaattcatgaatatgatatttattcttctatatttttcatgtcagccatgttccaactttgttttctattcatttccatttctttgatcattgaatcactatcgtgattgatataatcgatgaattttaacacttatgcaaaaagtaaacctttagcttttgctatatttattctattttctctctctctctctgcatatatatttttttctaataaagttgcaggtagatacctttatataaatgtaccaagatggaatatggaaaagactcctagataaaatggtctgtaaatggattaccatttgtaaaacaaataaaactaattataagtgatcagataataattcagatttttcacaagtcttgtctataaattggcagtatcatatagaacatattctattactaatactgttaaggcgagttgcttataatctttcactttgtatttacataggaggaaaatttttcagcgaagcaacagataaaaatgctacagtactgtaattcagctaacaatgagactatcttttatacagcatttttcatcttttaacaggttctgaagttaaaatgtagtactatatataacttttcttaagctttaaaaatactgctttaaaatgccatttacaggtaggtggtaggtattaacatcttagaaacaaagtatttgttcattgattaaataatttttaaaatactgagtacctaaattgtgctaatcttttgaagtttatcaagtgcaaatcttttgaagtttaaaagtcataactttaaagaaaagaaaatgtaaaaacagtttaataaaataaaaatatagatcacatgaacaatggcaatcaactaaacagtgacaactattaatgaaaatactcttcatcaaattaaagtatttgaatttatggataataagagtaataaaaatattttaaattatatcaaatatatctgtactacagggtcatctcaggttcttataccaagaaatctaagccccaggcttagtggcttacacctgtattcccggccctttaggaggtggaagcagaaggatcatttgagctcagcggttcgagatcagactgggcaacacagtgagactctgtctctataaaaaatttaaaaatttttaaaaaaaaatctatgacagctatttaaacattcaaagatttaaagtaaaaatatagtgcaaacacacataaacatttggcattcaaaattctaacatacttcagtcaactcttaattaggctacatattagaacaaataatacatcagaatgggaatttatcattagacgtctagcaaagcagcttgcagcgatattgttcaccttaaggaaaagaggtaacaataccataaaatgattttgaaaaggacaactcattgaaattagaacatcagaaagatgtaggaactgggattattattatgataccctcctaaaatgaacaaagtccactaaattgtgtaatctttcccctcttctataaaatgagaaatatttactttctttagatgattagcacaataaagtaatattagcaatattagctaattaataattagctaattagtaatttagcaatattagctaaagtaatattagcacaataaagtaaatattagcgcaataaagcaaaattgttgaattatgtagcaaaaataataaagaaagcaattttccaagattaaaaataaagtatgacttgctcattacaagtactgcaaattgctctatgctaatttgcaaaaatcacaaggtcaaactggaaatgtctcattaattttctgacagaaactcaaagggctataaacagataaatgaacataaacatgaattaccatcagagatcatcaatttctgttagacatgaaattggattaattgtagactaaaacatttctttaactctcttattataaagaagacattcaaaaaaatctcagataattttatcaataatagaatttatttaactcttttcatagtatcatcttctttgtgataatcccccttccccagaagccaaatctaaattttgaatcattttatttgaagagattttgaaagtgatgttcatgtaaaataaacctgaaaaattccccagtgtactaaagtttagaaccattaataaatctctcattctgtaaataagtaaatatttaaattggtgaatgaaaatgattccttgaaaattctagtttggttataaaatataaagatcattttgtctatatttcattataaataaatacaaatacataagattttgttcacccagaaatacctataacaaacacagtaattaagaatgctacaataatatgactcaaacagaagcaagtaaccaagtatatgagaattgtgttataaaattttagacattcaaaacaatataaaacattacagaactaagaaaaatatttcatatgttttaaaacagaaatcataaagtctcaaatgaaaaataagtacaaaataacaaactaccaacagtaatcatgtatgaagactaatcaacggagaaaaaaggtcactactgatcaaaatgggtttatataaaaattagttccacataataaatagtttttttcctattttagggtaattgaaaactccacagaagaaataggcaaaagtcatgaacagaaaatgaaaaaaaacaaacatgaaaatatattcaatttcatttctaaatacgtataaattaacataagattatgtgtatatatatgtatatattacattatataaaatgtgtagctctctgtttttagaaactatgtagtgattattttctcccaaatcttaaatgtattataaaacattaatataagattcattttattccatatgcaatttaaaacattgaatcaaatttactaaggtatacataaccccggatgcttcgagaattacatgaatacgatgattttctgagatacaatatctgcttcacctttcctgaatttccaagtacataacttaaaagggtgtttctcagagtggcctctcccattgtctaaaagccaaactctggtgaccttaagagccaatttcttatctctggtatcatgttttggcctgagtatatgggattttattggatgaattgtgttcatatgttactacagaaacaatttaagtctcattttccaacaaaagttggaaaatcttcaaaaatgaacaaagaaaactcaaaagccaaatgaacaggtttatgattatccattgtttctaacagtgtttacactgtacttcaaaagatggcctcatggggaggtaactgtttatcatctaagtcaggaagagctttgaggttcaagccagagttcctgagcaatgcttaggtatcataacagttcaattggattagagaaattctaaaatgtcaagtcacaggagttctaactcgttttaagagtccaaatccaagtcctatcagaaaaaaataaagaaattattactcttccatcaatttttcaacaaataatgactgagtttctgccatatcgtaggcactgctctagagatttggatacaccaatgaacaaaacagatgaagatcttagtcctggtaaagcttacgttttagtggaggtgaagaaagataataaacaataatcataataagtacataaaataatatgctagaagttaagacttaatgtaactcaggggaaagaggtcaggagtgcttgaggttgaaaggaggggaggtgatttattatttaaaatatagtggaagggttaaacctcatggagtagttttcaaatggatgagggtgttaaccattcagatactagaagaagtgtgctccttacacagtaaacagccagtgcaatggtgccctgtggtagaatgtgcctgatatagtcaagaaaaatcaaaagactgataagggtagagaacagtaagttgtgggggaaaaactagctgtacacaaatataactgaaaaaatattaagaatcaatataaaatctaaactgaatgtgagtcagcaagccaaatgttaataagtataattagcagattaaattatacgcaatttaacagtgtcttacatttaatcattttttctttaataagtgctacatttctaattgacagtctatacttgtctggtatactcagctttttcttttctttcttttttttttttttcttttggagatagagtctccctctgttgtccaggctggagtggagtggcacaatcatggctcactgcagccttggtctccttgggctcaggtgaccctcccaccttagcctcccaagtagctgggactacagatgcacacctacatgctcagttaattcttttttttttttttttctagaggcggggtttcaccatgttgcccaggtgggtctcaaactcctgggcctcaagtgatctgcctgccttggctcccaaagtgctgggattacaggcatgagccactgcacctggctaactttttcattttaatcagttattttccatataaactttacaaaaatcactaatacatcccatcctcatgtcaccaagctgaagtttacaacgttgtctctgatgactttactgctaaatttctatttttcttaatctatgtggcctaccagtcagtccataaataatcaaagtcacagatgacattttaaagaactgtaattttcatttgaggtacttctatgcctctttcttgtgtaaagccttccctcacccatccaagaaaaacagatatactcctttgtgttacaccatgctcgttaatatacttctattatgacttgatgacattagtacacacaattatttgttaatgtgtccttattctacctttcaagactgagtttcatgtgaaagcataccttattaatctcatatcctgggcccccagcacagggcctaaatttgttgttgaataagagaatgaatgaggtaaagagaatagaaaaattgtaagaaaaaaaattgtgggtggagggaagccaaaaaaagcagaaagtatacatcaagtgtaaatttaaggcatctgtttcagaaaaagaacagggaactcaggttatgattcatttccaaagcagagaaaaagtagaagtaatacttggccaagaaaaatatggaggggtgatggtaaaggagtattccttgggacttctttttactgggctctgtgacaaattgtccagctttctaaaataagtgaggatcaaggagttagaatcttacatattataatcgaaagtgggatcctccccattttaaaatgttttaatgggaagcaatagaatttgggggagttatacatttattccttgtagtaaatttgctgttgctatgagttttgaaaaatagagggagtcatgtaaccatgattatgagacacataacagtttcatcatgcaaagaaactccttcatcatgatgcttgtcaacccccaccctgcaacctttaatccctagtaccacttatctgttctctgatactacagtttggtctttcctagaatgtcatataaatggaatcatacgtaatctttagggttttgcttctttcatttagccataatgtatctgacatttatacatgttgttgtgtgtggaaattttttttcctttttattactgagtttgtccagtgtatgaacatacaacagtttatccaggcatcacatgaaagatacttgggttgtttccagtttttgacaaaagagcttgataaaggtgtgtagtgctacctaatatggtttgaatttgcattttcctaattactaatgatgttgaacatcttttcatttgtttacttgccatatgtgtatcttctttgatgaaatatctgttcagctctttgcatattttaaaattggattggttttcatattattaaggtttttatagcaattctttgtatattatgcatacaatccctttgtcaaacatgtgatttgcaaatattttttcctggtctatgccttgtcttatcattaacagtgtctttcagggagtaaaagcttttaattttgatgaagtccactttatcaattttttttgtttaatggattgtacttttgttgttatatctaaaatctgtttgcctaattaaacaaagatattctacatttttaagagttttatacttttacattttgtgtttacacctataacccaccttgagctaaatgtgaggtaaggaacaaggttcactttttttttgcacacaggtattcaattaatcctagcctattattcttaaaggttatcacttttccatgaaattgtctttgcattagcaaaatgaatcaagcatatttatgtgtatctttttccaaactctctattctattctattctttttttttttttttttttttttttttgagacggagtctcactctgtcaccaggctggagtgcagtggcacgatctcgactcactgcaatctctgcctcctgggttcaagcaatcctcctgcctcagcctcctgcgtagctggggctacaggcacgtgctaccatgcccaactaattttttgtatttttagtagagatgggatttcaccatgttggccaggatggtctcgatctcttgacctcatgatccgcctgcctcggcctcccaaagtgctgggtctgctctatttatctatacgtataagcttttaccaataacacactgattactgcatcttaacagtaagtcttaaaatcagataatttgagtttccaacttagttcttccttcatgaaattgttttgcctattccagttactttgcctagacatataaattttagagtaagttttatatctacaaaaaaagccttctaaaactttgagattgcattgaatctataaaacaatatgaaaagaactgacatcttaacaacgagttttccaatctgtaatgaagaattacccatccagaatatcaacagtatcaatgttgagaaaccctgttgtaaacttctgtagatgccctttaaggaagttttcttctaatacctagctgtaaagattttttttaacatgaattaaagttgaattttgtcaaatgcttttctatgcacctattagtaggatcctatcatttttattctttagtctgctaataaaatgaaatacatccattttcaagtactgaagcattcttgcattccagtttgatctgtcaatatttattgaagattctgatgtctgtgtccatgaggtgtactggtatgtacagtcatttcttgttttaatgtatttcactttattgtgctttgcagatattgtattttttacacgttgaaggtttgtgtcaaccttgcatccagcaagtctttcggtgcaatttttccaatagcatgtgcttactttgtgtctccctgtcatgttttggtaattctcacagtatttcaaactttttcattattattgtatctgttatggtgaactgtgatgagtgatctttgatgttactattgtaataattttggggcgccatgaaccacacctgtataaaatggcaagcttaattgataaatgtgtgtgttctgaatgctccagctaccggccatttcccatctctctctttctcctcaggtctccctattcccttgagacacaacaatactgaaattaggccaattaataatcctataatggcctctaagtgaagagtggcatatatctcactttaaatcaaaagctgtacacgattaatcttattgaggaaggcatgtcaaaaactgagatagccaaaacctaggcctcttgtgccagttaggcaagtggtgaatacaaagaaaaagttcaaaggaaattaaaagtactattccagtgaacacatgaaggaagtgaaagagccttattgctgatatgaagaaagtttgagtggtctgaatagaagaccaaaccagccacaacattctcttaagccaaagcctaatccacagtaaggtcctctctttaatgctatgaaggatgagagaggcaaagacgccgcagaagaaaagtttgaagctagcagaggttggttcatgaagtttcagaaaaaagccatctctgtacataaaaaaataataataataaaacaaaaaggtgaagcagcaagtgctgatggagaagttgtgctaacttatccagaagactgaactaagataactgatgaaggtggctacactaaacaacagattttcaatgtagacctaacagctttatattggaagaagatgccatctaaacctttcatagtaaaagaagagaagttaatgcctggctttaacgcttcaaaggacaggctgactctcttattaggggctaacgcagctggtggctttaagttgaagccaatgcttatttaccattccaaaaaatcctagggtatttaagaattatgctaaatctactctgcctgagctctataaatggagcaacaaagcctggatgacagctcctctgtttacagtttggcttactaaatattcaaagcccattgttttgatccactactcagaaaaaagattcctttcaaagtattactgctcattgacaatgcacctagtcacccaagaactatgacagagatgtaccaggagattaatgttgttttcatggcttctaacacaacatccaatctgtagcccagggatcaggaagtaatttagacccaagtcttactattgaaaaagtatatttcttaaggctctagcctccatagacaatgagtcttctgatggatctgggcaaagtaaattgaaaatcttctggaaaagattcgtcaagaacattcgagatttatgagaagaggttaaaatatcaacattaacagaatatcaacattaacaggaatttggaaaaagttgattccaactctcatggatgacttagaggggttcaagactttggtggaaggagtcattgcagataacatggaaatcgcaagagaactagaagtagaacttgaagatgtgactgaattattgcaatcttatgatcaaacttgaacagatgaggagttccttcttatggatgagcaaagaaagtggtttcttgaaatggaatgtactcctggtgaagacactgtgaacattattgaaatgacaacaacagaagatttaagatattaaatgaacttagttgataaagcagtggcagggtttgagagtattgactccaattttgaaagaagttctactgtgggtagaacgctaccaaataacattgcatgctagagagaaacctttcatgaaaggaagagtccatggatgcagcaaaattcactgctgtctctttgttgttgttgttgagatggggtcttgctatattgcccagactggtctggaactcaagtgatcctcctgccttggctcccaagtgctgggattatagctgtaagccactgtgcccagcccattgttgtcttaagacattgtcatatccaccccatccttcagcagccagcacatcaatcagtcagcagccatcaatattgaggcaagaccctccaccagcaaaaaggtaatgacttgctgaaggctcagatgattgttagcatttttagcagtaaagtagtttaattagggtatgtacattttttagacataatgctattacacacttaatagattacagtgtagtgtaaatacaacttttaatacgcactggggaaaccaaaaattttttgtgacttgctttatagcaatatttactttattgaattagtcttgaactgaacaagcaatatacctcagtatgagtagagtttccttttcttgtaatattttgtctaattttgtatcaggctaatagtttccttataaaatgagttgagaaatgttatctcctattttctgagatggattgaataggattactattattaccttaatggctggttgcaatcaacagcaaaaatatctaggcctggagttttcattgttggaaggttttaaatactgattcaacttctttaatagatataggactatttgtgttatctacttctttatgagttttgttaggatttgtctttcaagaaattggcccatttcctccacaattaactttttatcctttgaatgtaaggtctgtagtcatatgccctctttcattcctgatattggaaatttgtatcctttctcattttcttgatcagcctaaccagaagtttatgaattttattaatgatttcaagcaatcatcctttcatatcaccaattattgtttttgtttttaatttcattgatttctgcttttatctattatttcctccattttgcttgttttgggtttaattttcccttctttatttagtttctttttcttttttcttttcttttcttttttttgagatggagtttcactccttgcccaagctggagtgcaatggcgcgatcttggctcactgcaccctccgcctcccaggttcaagtgattctcctgccttcagcctcctaagtagctgggattacaggcacacaccaccatgcctggctaattttttgtatttttggtagaaacggggtttcaccatgttagtcaggctggccttaaactcctgacctaaggtgatccactcgccttggcctccctaagtgctgggattacaggcgtgagccaccgggcccggccccttttttagtttcttaaggtgaaagcttaggttactgatttcagacaattctttctaagtaagtttttaatgttttaaatttccttctaagtgctgctttaattgcatgctacacattttgatacaacgcgttttagtttttcattcagttcaaaagactaattttcctcgagaatccctctttgatccaagagttattagcaaagacttggaaccaacccaaatgtctatcaatgatagactggattaagaaaatgtggcacatacacaccatggaatactacgcagccacaaaaagggatgaggtcatgtcctttgcagggacatggatgaagctggaaaccatcactctcagcaaactattacaagatcagaaaaccaaacactgcatgttctcactcataagtggaagttgaacaacgagaacacatggacacagggtggggaacgtcatatactggggcctgtctaggggtgggtggctagggtagggataacattaggagaaatacctaatgtaggtgacaggttgatgggtgcagcaaaccaccatggcacatgtaaagtataatttgtttaaaaaagtgtatttttacattttcaaacatttggtgatttttcagatatcttctgttcttgacatctagtttcattccattacagagaacatactttatatgatttcaattcttttaaatttgctaaggtttcttttatggctcagaataagatcttttttaatgttccacttgccctcgaaaagaatatatattctgccactgaggagtattttataaatgttaattataaatgttggggtggccaggcacagtggttcacacttgtaatctcagcactttgaaaggctgaagtgagaggaccacttgagcccagtagttcgagaccagccagggcaacatagtgagacctagcctctataaaaaatcaaaaaattagctgggtgtagtggtgtgtgcctgtagtcccagctactcaggaacctgaggtgggagaatcatttgagcttggggatgtggaggctgtggtgagccatgattgtgccattgcactccaacctgggtgacagggtgagatcctgtcttaaaaaaaagttgggggccgggcacggtggctcacacttgtaatcccagcactttgggaggccaaggtgggtggatcacgaggtcaggagatggagaccatcctggctaacactgtgaaactccgtctctactaaaaatacaaaaaaattacccgggcgtggtggcgggcacctgtagtcccagcttcttgggaggctgaggcaggagaatggtgtgaacccaggaggaggagcttgcagtgagccaagatcgcgccactgcactccagcctgggggaaagagcgggactctgtctcaaaaaaaaaaaaaaaaaaaaaaagttggggtgttttataaatgtcagttggctgataatattgccaagatcatttgtacccttactaattttctgtttacttgatctactattatgagaggagtgttgacattgctaagtataatgtagatttttctattttctcctctcagttctgttaccttttgctttttagactctgttatcagctgcatacatactttggttttgttctgtcttcttggcaaattaatctgctttttaatatgtaaatgtccaactttatccctgtcagttttctttgttctgaaatctactttgatatataattaaatctactccaactttttttcaattactttctgcatggaataactttttctatccttttaacctatctttatcactataattaaaatgggtttctgtatatattgagtcctttttttacccagtcaaaaaatctcttttaattggagtgcttaggccatttatatttaacatatctattaataaggtttgatttaggtctaccattttattgtttgttttctgtttatcccttttttcaccaccttctttttggataactttaatgttttaatgttccattttaatttatttattggcttttttggctaaaaactcttagtatctttatagtcactactttatgaaatagaacacctaatatttaatagtctacagttaacattttagcatttcaactaaatatatataaccacatagttccctttactctgtagcctttgctttaaaagtcacttgtactatacatgcaaacctggaaaccttccccagcaatgccataaattttgctttcaagagtagagtcagggccaggcatggtggctcacacctgtaatcccagaactttgagaggctgaaatgggaggattgcttgagtagtcatattgaaagaccttaatagaggagaaaaactctgctgtatttatttagatattcacagtttctgttgctctttcttcattcatgaagttccaagttttcttctgataccatctccctttagcctgaagaacttttgttagcatttcttttagaccagatttgctagtaataattcttagttttcctttatctgggaatttctttattttgtcctcatctctgaagtacattttcactgaatacagaattctgggttagcagtgcttttcttttagaactctaaagatgctatttcactgtcatctgtcctccatggttcctgttgaaaaccctgcattcacttgaactgttgttccctatatgtaataaattatatttctctggcaggtttcaagattttttgctgtaatcttctatgtttagaagtttgattatcatgtgtttagaagcagttaactttaagtttatcccttttgaggttttgttgggttttttgttttgttctgttttggatttttgtgtgtgtatgtatggtgagaacacttgagatctactatcatagcaattttcaagtacacaatataggtctccagcacttaatcatcttataactgaaggcttgtaccctttgaccaatatctccccttttctcctatcccccagcctctggtaatcaacattttactctctgttactataagtttgactatttttaggctccatatctaatacatgagatcacgtggtatttgtctttctgtgtcttgcatatttcatgtagtttattgacctccaggttcatctgttactgcaaatcgcaggatttcctttttttttttttttaaatctgaaatggtattccattgtggtgtgtgtgtgtgtgtgtgtgtgtgtgtgtgtgtgttatatacactgtagtttattaatccatccttctgttgacagctacttaggttgtcttaatatcttggctactgttaaaaatcctgcaataaacatagaagtgcaaatatctcttccaaatactgattttatcttctttcaataaataacccagaagtagaactgctggatcatatggcagttctacttgtaattttttgaggaacctccatactgttttccataatggctgtcctaatctacattcccaccaatagagtaggaaggttcccttttctccacatccttgccaacacttgttatcttttgattgttttttatactggccatctagacagatgtaaggcattattaaattttgtggtttagatttgcatttctctgatgagtagtgatatcgagtgtcttttcatatatcagttggccatctgtatgttttctgatcctctgcccatttttattatttagtggaagggaatatgagtgattttaagataaggcaaggagttgtgatccaggtaatggaacatggtaaaggcatttatcttttttttttttttttttttttttttgagacagggtcttgctctgttgcccaggctggagtgcaatggcatgatcttggctcactgcaacctctgcctcctaggttcaagcaattctcgggcctcagcctcctgagtagctgggactacaggcatacaccactatacctggctaattattgtgttttcagtagagatggggtttcaccatgttggccaggctggttgtcttgaactcctgacctcaagcaatccacctgccttggcctcccaaagtgatggaattataggtgtgagccactgcgcctggcctctttgcccattttttaatgttgttgttgttgttgttgttttctactgagtttcttaaatattctggatattaacaccttattggatacatggtttacacatgttatctctcattctgtaagttgccttttcattttgtggattgtttcctttgctttgcagaaacttcatttgtttgtttgtttgtttgtttagacagggtcttgttctatcacccagcctggaatatagtgatgaggtgatagctcactgaagcctcaaactcctgggttcaaccaaccctcctgcctcagccttatgagtagctgggactacaagtgcatgccaccacgtctggctaattttttaactttttgtagagatgggaatctcactatgttgcccaggtagatctcaaagtcctggcactcctgacctcaagcaatcctccagtgtcagtatcacaaagcactgggattacaggtatgagccactacacttggcttgaaacttctcagtttaatgtcgttccacttatttatcttttctttgttgcctgtactttgggtgttaagtccaaaaatatctttgccaagaacaatgtcaattagcttttcccctatattttcttttagtaattttacagtttcaggtcttatgttaaattatttaatttgttttgagttgatttttgtgtatgatataagagaaaggtccgatttctctctctctttctttgttttctttctttccttctttctttttcctttttttttttttttttttgcatgtgaatattcagttttctgaacactatttactgaagagattatcctttccctattgtgtactcttggtgtcttgtcaaaaattagttgaccataatatgcatacattaatttctgggttctctactttgttccattggtctatgtatctgtttttgttttagtaccaagctgtttcaattactatagcattgtaacatagtttgaagtcaggaagcataatgccttcagctttgtttcttttgctcagggttgctttggctactcaagactggaggtttgatataaattttaggaaacttttccattttctatgaaaaatgtcattaaaattttgaaaaagattatattgataagagacttggacatcaggaagactggcagactctgaacagatctttggagggaaggcatttagagtggacagagggaggaagcagacactgggtggaagagggaggaagccgggaacccagcatggggaggctaagcacagggacttgttcctagcccccagcatcttctggggaaaaggcaagttgaacaagtgaggagcggcccgctctcaccacagactgccaggatcctagcagcaggagatcatttccccaacagacacttaagctggcagggagagatgcctgaaaaggctgtaggtacagggctccagcctgtgcaaaaccaagagggcttggcacaggaagagctgcactggagcacatccaaggatgcccctcccccaaggcttaccatgctcctgtgggagcctttagccttagggtgaccgtcagacctggacagagaaggtgctcttgcctgtaggacaaagccagtctgatctaagcaccctcctgtcagctagcctctccttgggctccagcctaccatgcccacttgcaatgcggcctcagatgcccaaccagggtgcttcctgggggccctatcatgcctcctttgctggcagacaattcttgaccatctcagagttccaacagaccagcccctgccaatacatgctagcccacccacagcttacccccaaggcagacttgcctcacctactttactggcatatactatttgcccatgccctgactccccactgctttgctggcacatgtcaccctcctctcccatcccatgctggtacatgtatgtgtgtgcaccctgacaccctagaactgccagcatgagtgtaccctgccattattcccccactgatgtgtgggcacagagatacactgccaccgacatgaaggcacacaatgataccagcaaccacacccctgccagcaccctgctcctgccatgatagcagcaagagagcatgcatggatgccagtacccccacccctgccacaactgcataagtacctgcatgtacatcactgcctcgcttccactggtaccctgccccagccaatgagggtgtacctcgctatacttctgcagatgctggcacacatgaaggagcatgaatcccactgccaccacctcgatgaagtggtttggccggtaccacccataggagtattgtgaccagtggactgaaaacaccttggcccttccagtgcagcagcttcctaaccttgaggggccagagaacaaagccaggggccaggtaccagttccccagagttatagcacacagccgaggagtgctgagctaagccttggcccactaaaatcttccagaaatgaagccaattgactgaacctaccttatatcacaatcaaacacccaagggcatcaaagaatataaaagcaaaaaaacccatccaaggacagcaacatcaaaggttgaaggaacatcagcccacacatgagaaagaaccagcacaagacctctggcaactcaaacagccagagtgtcttattacctccaaacaactacctagtttcccagcaatggttcttaaccatgctgaaatggctgaaatgagtgacatagaattcagaacatggatacgaatgaagatcatcaagattcaacagaatgtcaaagctcaatccaaggaatctaaggaatatgacaaacggatacagaagccgaaatatcgaagggccattttaagaaagaagcaaactgatctgatagacatgcacacttcgagaatttcataatataatcacaagtattaatagcagattcgaccaaactgaggaaagaatctcaatgcttgaagactggttcttgaaattagctcagtcagaaaaagaaaaaagaataaaaaggaataaacaaaacctctgagaaatatgggattatgtaaagagacaaaatatgtgattcattgccatccctgaaagagagggagacaaagcaaggaaattgggaaacatatttgaggataacaaccatgaaaatgtccccaacctctctagagaagtcaacattcaaattcaagatatgcagagaatcctgcaaaatactatacaagatgaccattccctaagacatatatagtcattagatttgccaaagtcaaaatgaaagaaaaaatgttaaaggcagcaaaacaaaaggggaaggtcacctacaaagggaacccgatcaggcaaacagcaaacctttcagcagaaagcctacaaaccagaagagtttggggtcctaaatgcagcattcttatagaaaaggaattccaggggagtagtcaggatggccgaccagaagcagccagtgtgcatggctctcatagagaaagacaagttaatatagcaccttcaattgaaacatccaggtactcacattgggattaatcaaggaaacaacttgacccatggagaatgaagaaaagcaagacaggacaacagcccacccaggagtaacgcagagccaggggaacctcccctgcccagggaagcagtgagtcaatgtgtgacctcaggaaaccacacttctcccatgaatctttgcaaaccttgggtcaggagatctccttgtgaacccattccaccagggccttcggtctcacagacagagctacatggagtcttggcagagatgctgctcagacatgcatggaaaccctggaggcttagatactgggctttccagcaaaagaagttgcagctctggcaaagtggaaggctggacccctgtacataccccttggaaagaggctgaatctagagggctaagcagccaaaacctacaggccccacttccacggcaccccacaagataagacccactggcttggaattctacccagccaccggtagcagcactgcacctccctagggaggagcgtccaggggaggggtgggccaccatctatgctgtttgggcaccttagccattccagcctctgggctttggagagtccaagctgaccagaggtggaaaggatcccccagcatagcacaactgctctaccaaaatgtggctagactgctactttaagcaggtacctgatcctgttcctcctatgggtggaacctcccaagtggggcctctagccatccctgcctgtgttctccagacaacacagatttgaattctccctgggatgatgctcccagagggagaggcaggtcgccatctctgctgtctgggtgactcagtcattcccatctttgggatttggagagtctgagcagaccaggggcagaaaagactcccagaaagcacagctgctctaccaaaatgcggccaaactgcttaagtgggtccccagtcccacttctcctcactgggcaggacctcccaaccagggcctccagcactcctgcctgtgttttccagccaacagagagctgaattctcccaggacagtgctcccagggggagtggcaggcaccatctttgctgtttgcctgacttagcttttccagccttcaggtttcagagtgtctgaggcaaccgggggctgaagtggacctccagcacagcacggaacagctgctctaccaacacatggtaagactgcgtttttaagtgggtcctcaatcttgctccttcttactgggtgggacctcccaggtctctacccacctcttacaggtgcctttgggccagcaacaggcctgtacctcccagggacaaagctcccagagagagggacaggctctcatctttgctgttttgcggccttcactggtgatacctccaggtactagaaaatccgaggcaaccaggtactggagcaaacataccacagcagccctatggaaaattggccagagtgttaagtaggtgcccattctcagatctcctcaccagacaggtcttccaggcttgtgtctccagccaccctctaccagagctaccgagcaagtagcaacttggcaactccctggacagggcctctaggggaaactaaaagcctctctgagactgccgctgcagtggatctgcccttgccggaccaataagagagtaaaaaccctaagtgtcgtgtccacacctccaaccagttgtaatcagcccaaggagaggaggccagtacgtctcccacaggtcccacacaccccacagtgcttgtgactagacagggaacccttggcctggggccacagtacagaccctccatcctggtctgattgccctgaggggctgctgacctatatctctctgggttggagcccccaggaaacaagcaaatgaccctcagtcacaactactaataagatccctttctctgctgcctccaacttgagaaagaaacataaacactgagatcgccccaaagctgcagtgggcagcccagaagtaccaaatcacaatctacagccagcattcaagggggagagaaactcacactttcagaacattgacagagaacacagctgcaattgtgaggaaacataggggagccacacaaccaaacaagtctaccaactgaccaaaaagcctaagccacctgctggatcacaccccaaggctttaacatcaaaaatacctcactaatgtacccacctctgaaaccagagtcaagaagtcagcttcaaataaagacactgcacaaagccttggcctggtgaaaacatccaaaagagaagtctgttgactatacttaatctacaatgcagataaaggaacacccacacacagagatgagaaagaaccaatgcaagagctccagtaactcaaatgttcagagtattgtatgccatccaaatgaccacacccattccccaacaagagtttttaatcaggctgtactggctgaaataacagaaatacaatccagactatggataggtacaaagatcactgagactcaggaagatggcaaaacccaatccaaggaaaatgagaatcacaataaagtgatacaggagctgaaggatgaaatagctggtataaaaacagaacccaatgggtctgacagagctgaataacacaatacaataatttcacaatgcaattacaagtattgacagcagaagaaaccaagctaacaaaagaatctcagcacctgaagactggttctctgaaataagaaagtcagatgaaaataatgaaagaggaataaaaaggaataaacaaaacctgtgagaagtattggatcatgtaaagaggtcaaatctacaaatcactggcattcctgaaagggagggggagaaagaaaacaacttggaaaacatatttcaggaaattgtccatgaaaacttccccaacgaggtacagggcctaacagttaaattcagaaaatacagagaactcctgcaagattctatacaagaagatcacccccaaaacacatgtcatcagctattccaaggttaaaatgaaagaaagacttttaaaggcagctagagagaaagggcacatgacctacaaaaggaactccattaggctaacagtggacctctcagctgaaaccctacaagccagaagagattgggggcccatattcaacattcttaaagaaaaaaatcttcaaccaagaatttcatatacagccaaagtgagcttcccaagtgaaggagaaataagatccttttcagataaacaactcttgagggaatccattaccaccaggcttgccttacaagagattttgaaaggagcactatatagaaaggaaagaccaataccagctaatacaaaaacatgcttaaacacacagaccagtgtcactgtaaaacaatcacagaaaaagccaacataataatcagttaataacacaaagacaggatcaaatccacacaaatcaatattaaccttgaaagtaaatgggctaaatgccccacttaaaaggcacagtgagaagctggataaaaaagcaagacccaatggtatgctgtgttcaagagacccatctcacatgtaatgacactcataggctcaaaataaagagataaagaaaaatctactaagcaaatggaaaacagaaaaaagaagggattgcaatctgaattcagacaaaagagatttcaaataaacaaacatcaaaaaagacaaagagggcattacttaatggtaaaggattcaattcaacaaaaaaacctaaataccctaaatatatatgtacccaacacacaagcacccagattcataaagcaagttcttagagacctacaaagaggcacaaactcccatggaaaaaatagtgggagacttcaacactccacagacagtattaaacagatcattgaggcagacaattaacaaagatattcaggatctacactcaacattaaaccaaaaggctcggatacacctctatagaactctccaccaaaaaacaccagaatatacattcttctcctcaccacatggcacatactctaaaactgaccaaataattggaataaaacaatcctcaacaaatgtaaaagaactgaaatcataccaaacacactcttggatcacagagcaataaaaatagaagtcaagactatgaaaatcactcagaaccatgcaatcacacagaaattaaacatcatgctcttgagtggctttggggtaaataatgaaattaagacagaaatcaagaagttctttgaaaataatgagaacaaaaatacaacataccagaatctctgagacacagctaagacagtgttaagagagaacttcattgcactaaatgcccacatcaaaaagttagagagatctcaaattaacaacctaccttcacaactgaaagaattaggcaagaacaaatcaaccccaatactagcggaagacaagaaaaaaaatcagagctgaactgaaggaaactgagacacaaaaaaaacaatcaaaagatcaattaatccaagggctgttgttttgaaaaaactaataaaataggccactagttagactaataaagaagaaggaagaaaagctccaaataaacacaatgagaaatgacaaagggaatgttactactgaccccacagaaacaaaaacaaccaagagaaactactatgaacacctctacatacacaaactagaaaacctagaagagatgagtaaattcctggacgtatacactctctcaagacagagccaggaagaaactgattccctgagcagaccaataatgagctctgaaatcaaatcagtaataaatagcctaccaaaaaaaaaaaagccaagggcctgatggattcataactgaattctaccagacatacaaatgagagctggtaccatttctactgaaataattccaaaaaaatgaggaagagggactcctccccacctcattctctaaggccaacatcatcttaatacccaaacctggaagagacacaacaaaaaaagaaaatttcaggctgatatccttgatgaacatcaatacaaaaatcctcaacaaaatactggaaaaccaaatctggcagcacatcaaaaagctaatccatcaagattgagtaggcttcaaccccaggatgcaagtttggctcaacatattcaaatcaataaacatgattcatcacataaacagaactaaagacaaaaactatatgattatctcaatagacacagaaaaggcctttgataaaattcaacaccgcttcatgttaaaaactctcagtgaactaggtattgaaggaacatacttcaaaataataagagccatctatgacaaacccacagccaactttatgctgaatgggcaaaagccagacgcatttccccttgaaaactgagaaggatgccctctctcaccactactattaaaaatagtaatggaagtcctagccagagctatcaggcaagagaaagaaataaagggcatccaaataggaaaagagaaagttaaactatccctgtttgcagatgacatgattctatatctagaaaaaaaaaaacatagtcttggcccaaaagttcctccatctgaaaaacaactccagcaaagttgcaggatacaaaatcaatgtacaaaaatcactagcattcctatacaccaacaacagccaaacttacagccaaatcagaatggcaatcccactcacaactgccagaaaaagaataaacttcatagcaatacagctacccagggaggtgaaaaatctctacaatgagaattacaaaaccctgctcaaagaaatcagagaagacacaaatggataaacatcccatgttcatgaataggaagaatcaatatcactaaaatggctatactgcccaaagcaatttatagattcaatgctattcctatcaaactaccagtgacattcttcacagaactagataaaaaccattttaaaattcatattgaaccaaaatagaacccaaataaccagaagcaatcctaagcaaaaatagcaaaggtagaggcatcacattacctgacttcaaactataccacaaggctacagtgaccaaaacagcatggtactggtacaaaaacaggcacatagaccaatggaacagaatagagagcccagaaataaggctacacacctatgaccatatgatatttgacaaagctgacaaaaacaagcaatggggaaaatactcctaatcaataaatggtgctgggaaaactggatagccatatgtggaagattgaaactggaccccttccttacactatacacaaaaataaactcaagatggattaaagacctaaatgtaaaacctcaaactattaaagccatggaagtttacataggaaataccatcctggacataggaatgggcagagatttcatgaaaaagaaaccaaaagcaattgcaacaaaattaaaaattgacaaatggatctaattaaacttaagagcttctgtgcagcaaaggaaactatccacagagtaaagagacaacctacagaatgggaaaaaaatatttacaaactatgcatctggcatggtctaatatccagcatctataaggaacttaagcaaatttacaaggaaaaaacaaaccactccataaaaatgtgggcaaaagacatgaacagacacttttcaaaggaagcatacacacggcccacaagcatatgaaaagaaagctcagtatcactgatcattagaaaaatgcaaatcaaaaccacaatgagataccatctcacaccagtcagaatggctattactaaaaagtcaaaaataacaggtgctggagatgttgcagagaaaaggggatgcttatacactgctgttagaaatgtaaattaggtcagtcatcagtcattgtggaagacagtatggcaattcctcaaagagctaaaagaactaccattcgacccagcaatcccattaccgggtatatacccagaggaatataagtcattctaccataaagacacatgtacacgtatgttcactgtagcactaaagaaaatgtgatacatatatgccatggagtactatacagctataaaaaagaatgagatcatttctattgcagcaacatggatcaagctggagatcatcattcctaagtgaaataatgcgggaacagaaaaccaaatatcacacgttatcacttgtaagtgggagctaaacactgactacacatggaaagaaggatgagaacaacaaactctgaggtctacttgagagtgaagggtgagaggaaggagaggatcaaaaactacctttcacgtactatgctcattacctgggtaataaaattaattgtacaccaaaccccatgaaatgcaatttacctagatgacaaacctgcacatgtacccttgaacataaaagtttaaaaaaggaaatactgcattgaatctataggtcactttgggtagtatggacatttaacaataaaaattcttccaacccatgagcatgagatatatttctatttatttgtgtcttctacaatttatttaatcaatgtttagtaactttcagtgtacagaggtttcacttccttgcctgaatttcctcctaagtatattattcttttctgatggaaatggaactgttttcttaatttctatttttggatagttcatttttagtatataaaaatgtaacttatttttgtatgttgattttgtatcatacgacttcactgaatttattaattctaaccattttttggtatttaggttcttatacatgtaagataatttaatctgcaaacagggatcattgaacttcttatgttctaacttggataccttttatttatttttcttgcataattgctctagctaggagatccagaatgatgttgagtagaagtggtaggaatggattcccttgtcatgttcttgatcttagagagctttcagctttttaccactgaatatgatgcttactgtgtgcttgttatatatgacctttattatgttgaggtacattacttctgtactttaattgttgagaatttttattaagaaaggatgttaaattttgtgaaatgctttgctaagcttcttgaatctataaatttatcttccccaaatctaggaacttatagctattattttgtcaaatgtattttctatattaatctcttcctcctctccttctaagactccaatgacacaaacttatatattttgctataaatttttaaatttcttcctgttctgttcttcagattggatcatttctattgatttactttgaaattcatatacgcacctctatcatctccattctgctttagaggctcatctggttaatgttttatttcagacatcatacttttaaatttccatggttcttcctgaagattttatttctctactcagaatttccatttttctattcatttcaagagttacaccttacatcatggagcagggttataatggctgctttgatgtctttgcctgattattccaacatctgggtcatctcacaataagcatctgtattcctttgagaattgatcacattttcctgcttccttgtaagtaaagtaattttggttttaccctagattttatattttatttttttagagatggtatcttgctgtgttgcccaggcttgagtgcagctgctatctccaggtacaataatagtgtactacagccttgaactcctggcctcaagtgaccctcctgcctcagcttcctgggtagcttggactacagaagtgtgccaccatgcctggctaccctgtatatttttaatttaatattattttaaaagtgaatgacagagtctttcctcaaagtgcacagagacaagaagatataaacatgtaagccaatagctacaacacattgataaatgctgtatgaaatgaattgcatgcctccaaaattcacatgtttaagtcctatccccaatatatctgtatttcaagatagccactataaggagttaattaaggtgaaatgaggtataagggtggggccttcatccagtaggatcatacaaagagtcaccagagagctctcattctctgtctccaccaagtgaggacacagtgagaagacgaccaaccacctacaagccagaaggagaatgcttgccagaaagcaaatcagccaatatcttgatcttggacttctcatcctccagaactgagaaataaatttctgttacttaagcctctcagtatgtagtattttgttatagtactctaagaacactcagagaattaggttattattggacttactctaccttgtctaacatcctaagttcagtaagatttttcaacagtagcttttaaaagcaataatgtggaaaagtatacagtattttaaaagattaaagacaaaatctatgctgtaacagaaagatggagtagaaaaataatggaagttttcttgagaaatttactgaaaataaaaaggtatacaaagaacacagaattcaataatacatagtagcggtagaagaaaagccaactgtagggaaagcttaataagtattgactagatagatggaaatagagagaaaacaggggaagaatgcagctgaactggacaacgagatggttagttaatagcgtcaatgggtaataaacacaaggaatagatctcatcatgcttaagtagaaaagaaccttgtatttacaataaaataagagggattaacagacaagagaaagaaataaagggcatccaactaaaaaggaaaaagtcaaattatccttgttttcagatgatatgatcttatattttggataacctaaagaattcaccaaaaagccattagaactgataaacaaattcagtaaagttgcaggatacaaaatcaacatacaaaaagtcagcagctttcctatatgccaacagtgaacaatctgaaaaagaaatcaagtactattatttataattgctataagtaaaatacctagaaataaactttaccaaagaagggaaagatctctacaatgaaaactataaaacactgatgccagaaatttaagaggacacaaaaaaactgaaagatattccatgttagtgaattggaagactattgttaaaatgcccatactactcaaagcagtatacatattcaatgcaatccctatcaaaataccaatgacatttttcacagaaatagaaaaaccaatcctaaaattcatatggaaccacaaagacccagaatagacaaagctatcctgagcaaaagaaacaaaactggaggaatcacattccctgacttcaaagtatactacagggctattgtaatcaaaacaccatggtactggcataaaaagagatacatagaccaatggaacagaatagagaatgcagacataaatccataaaactacagttaactcatttttgacaaagattctgaaaatgtatattggggaaaggacagtctcttcaataaatggtgctgggaaaactggttatccatatgcagaagaatgaaactagacccctctctctcactgtatacaaaaaatcaaatcaaaatggattaaatactgaaatctaaaacctgaaagtgtgaaattattaaaagaaaacattgtggaaagtctccaggacattggactgggcaaggatttcttgactgacaccccataagaacagggaaccaaagcaaaaacggacaagtgagatcacatcaagttaaaaagcttctgcactgcaaagtaaacaatcaacaaagtgaagagataacccacagtatgggagaaaatatttgcagactactcatctgacaagggattaataagcagaatatataaggagctcaaacaactctacaggaaaaaactaataattaaacttaaaatgggcaaaagatcagaatagatgtttctcaaaagaagacctataaatggcaaacaggtatatgaaatggtgctcaacatcattgatcatcagataaatgcaaatcaaaagtacaatgatatattatttcactccagttaaaatggcttttatccaaaagacaagcaataatgaatactggtgagggtgtggagaaaagggaactcttatacactgttggtgggaatgtaaattagtacagccactatggagaaaagtataggggtttctcataaaacttaaaattaaactaccatatgatccagctatcccagtgctagatatatacctaaaagaaaggaaaccagtatactgaagagatagctgcactccaatgtttattgcagcactattcacaatagccaagacttggaagaaacagacaaatgaataaagaaaatgtggtaaatatacacaagggagtactattcagccataaaaaaatgagatcctatcatttgcaaaaacacggatggaactggaggacattatgttaaatgacaaaagacagacacagaaagacaaacttcgctcattttcacttatttgtgggaactaaaaattaaaaacagttaaacttatagagatagagagtaaaataatggttaccagaggctggggagggtagtgaaggtggggggcagttagtggggatggttaatgggtacaaaaatgtagttagatagaactaataagatctagtatttgatcacacaacagggtgactacagttaataataatttattgcatatttaaaaataactaaaagagtataattgaattgtttgtaatgcaaaaaaatgaatgcttgaagtgatggataccttatttatgctgatgtgattattacacattgtgtgcctgtaaaaaaatctcatgtaccccataatatatacacctactatgtacccataaaattaaaaattttaaaaatgtaatctatcagaataaaatcatttaaaatacctaatatcaataaataaagccaaaaaatgtaaataacatttgaaaaaagataatcaacaattaagaatacatcttcttctcaagatgggacatttattaaagtaactataaactaggcccttaagtaagtcttacaaatttcaacaaaatctaccatacaaaccaaattctgactataactcaattaacatagaagtaaatatgaaaaggtaaaatctcctattttcagaaacataaaaagacttccaaattactcataagacaaagaaatgatcagaacaagtagaaattacttaaaaatgagtattaatgaaaatattacattactcaaacataaatttagccaaagcagtagttggagaaaaatttgaaaattaatctgctaagagtccaacataaacataatagagccaaagaagatataacagaggaaacaataatgcattaatatacataaatgatcagcaaagccataaattagttatttgaaagactaataaaacagacaaatctctggcaatactggttaagaaaaaaagaaaaaggaactaacgatcataaaataaaaacaaagaactaaaaacgttttagactttatatctctttagagagctttaatttttaaaaaccattcagctgaattaatctactttaagtgtcacattaaaggaaatactacaactaactagagatttaaaaattgagagtatatgggatagaagacattgacaactttaaggagaatacaaaatagaataacatcaaagaaatcaacaacctgaatagagttgaaagcataaagtgaattagtagttgaagtgcatgtacacacacaaatacactcactcacactcaccatttgacccagagagtttttactggtaactgctacctaatagaccatgattccaaacttacgcaaaattctcccaaagaatgaaaaaaagacaaaacacctgcaatgcatttttgaggctaggataaccttgacaacaaaacccaaaaaagcacaaaacagactaattttactcataaacacagaacctaaacctctaaaatgttatcaaaccgaaatcctaaatctggcaaagtagattaaaacaatatatgaggctcaagttggatttatcctaagaatatttaggtgatttaacatgagaaaaacaattgatgtaattcttcacattaaaaaataaaggcaacttctgggatagaacaaaattaagtagatgtattttcctcctgctaaatacaactaaaaactctggctattttatgaaaacaaacattaaaagattctgaaggtggagataaaaaggaagactggctagaaacttcagaacccagagaatgacacagcagtaagttccctgggtttctttttacctcttataccccggactgtgtgctagacaaattagcaaactgtatctacactataaatacaggaacaacaaacttgctttatccttctcctcttgagtgttctaaattatctttggtggtggagaaaaaaaattataacactgtctaatgtggtcctatatgtatgtagaggaaatatttaaaacaactatgctacacacacagggtagaataaagggacataaagaaaggtaagatttttaaacttcacactggaaaatgataccagtagactggtataatataatactgcaaccactgaaaaatctatataaagagatacactaaaaaacaatataaataaaaatggaattctaaaaagtattcaaacagccccctagaagacagaaaaaagaaaacagagaaaccaagaacagggggaacaaacagaaaactaaaagtaaaatggaaagcctaatgtatttacccatattcttgtttactgtatcctttcttcctgttattccaaagttttgttgttgttgtttgttttgagacagggtctcattctattgcccaggctagattgcagtggcatgatggcacgatcacagctcactgcagcctcaacttcctgggcttaagtgatcctcccacctcagccgcccaaataggtgggacccacagacgcatatcaccatgtctgattaattttttgtatattttgtagagacagggttttgccatgttgcccaggctggtcttgaactactgagctcaagtgatccgcttgctttggcctcccagcctaaagttctttcttttatcatttcctttctgcttaacgaatgttctttaaccattatttgagggtaagtctgccggcaacacatttccttagttgtctttcctgtgagaaggtcttaatgtttccttcattgctgaagaataattctgctgtgttgacagttatctttcagcacttgaaatatgttttaccacttcctcctggcctccatggtttctgatcagaaatctactgtcattcaattgcttacttgtaggcaagttgtcatttttctctatttgcaacattttttctttgtctttatttattggtttaattatcgtgcctttggcatgaatttatttgaatttttcctatttgtggtttgctctgtttcttgaatctgtttgcttatgtctcttgctaactttgggaaattttcagctgttgagtactttttcagtcccaccttctttcttctctccttcaagaattctgacaggtgtcatcttttgttattgtcccacaggtccctgaggctctgttcattttttaacaagtctaatttctctctgttgttcagattaggaaatttctattgttttgtctttcagttcactggttctttccactgtaactcccattttcctgttgggtccatccactgaactttttcagtttcatattttttcagcaccaaatttccattttggtcttctttgtatcttccatttctttgctgtggatttctactttttcatttgtttctcacatgtattgctcaaagcattttaatcatggatgctttaaaatctttgtcagtgattctaacacctctgtcatctcagtgttgacatctattgactatcttttattatgcaatctgagatcttcctggttcttggtatgacaaatggtttcaatggaaagctggacatatttatattatgttatgaaactctggatcttatttaaaccttctgttttaactagctttttgtgacactgctcccacaggggaaggtgggaggggggcattgcttcattactgccaagtggaggatgaagttcaagtttcccaattggcttccactgacacccaataagggcatcctcattactactgtgtgggacttggagtccaggcttcctacatggtttccactggcatggtacttggggtggcctccttaccactgggtgacagtgaaagacataactctctaacaggcctcttctgaccccaccccagtatggccaggaaccagcacattacttttggatgaagatggcagcctaggctccacagtgtggtgttccgtcaacattgtgggaaggggggtgttggggaagagagagagagtttttgaccagccaagagggaagaaatcttatctctctggccttctctgatacaaccctaatggtggtactgggacactgttatagcctcaggagggcggaattctaagcttcccattcagccttttttaagagtaggtggtactacggtttttttgtgtgatgtttaaagtagagcagatacggctgaaaagttttctgttttgctaggctgttctttctctggtcctttggctagagagaatagtatcttgtggagaggttttcattgttgttgtttttttccctttgcctgttgaaatttgcaggttcctggcttatccaacacccagtctgggatatatgaggtaaaaagtaaatccaggcaacccactactgtgtcattcctaaggttctagtgtccttaaccagtctttcttctactcgctacctttcagagtcttcttatgtttgttttatgtataatgcccagggtttattattgtacttagtgagagaaataggggaaagtatgtcatgttcatcttcccagaggtacaagtcttcctaaattgcatttccctcccaccatttgatatgatagaagctatgaatgagggcagggatttttgtttaattccctactgtatgcccagcacttacaacagtgctaggcatatagtagatactcaataaatacaattgaataaataaatgaaaaaatgcatttatagtgatccattacattatgtttttgaatgagtaacttgaaatttaagtagcttagtgatggataaataagtttagaagaaaaatagtggtgaactataatacaactaacaagttaaaaaacaaatcaattgattttcctctataaatgaaattaaataattaggttttttttaaactatcaattaagtctaccaacttagactaaatctaactctgttttggaaaatgagtatcctctaacgtctttctcttctttattctattttcctcctccccctttatcttcccttgctttctctttcttctcctatcattttttctcaagtgtccaaaacaaaccttgatattttctcttttcctaaacatgttcttctttttcagtcaccctgggtaatgaccacatccagactggaatctctgcatcgttccagtcctcagctttctcctacccacaaccaaccaattcctaagatttcttaatactactaatgcataccgtattgtctagcttcactggttagtctcttctttcttcttttttctttgaataaacttataactgtattaattttttctttttaaaaattatttaaaaatttttaaattgacaaatacaaattgtatatatgatatacatgttttgaaatttgtatatatcatggaatggctaaattgtactaattaacaaattaatatacatattacctcactttcttagtccatttttgtattgctataacaatacccaaaactgggtcatttatagataactgaaatttatttctcatagttctagaggctgggaagtccaagatcaaagcaccatcagatttggggtctagtgagggtcctgtctctgcttccaaggtggtaccttgaacactacatcctctagagtgaaggaatgttgtgtctccaaatggcagaaagcaaaatggcaaaaaaggacaaactccctctgtcaagcccttttatagaggtattaatccactcatgagggctctgcccttatgagctaagaacacctcccaaaaagccccacttcccagcactgttggacagggggttaagtttccagcatatgaatttgaggggacacatttaaaccacagccctcacatacttatcattttttggtgagaacactgaaaatatactcttttaggaattttcaaatatccaatacactttaactatagtcaacattttgtacaatagatctcttgaacttatttccttttaactgaatttttatatcctttaaccaacatctctctgatccctctccttccagcacacggtaaccaccattctactctctacttctacgaattcaacttttttagatgccatgtataaggaagtcatgcagtatttgtctttaagtgtctggtttatttcactcaacataatgtctcctgggtcatccatgttgtcacaaatgacaggattttcttcctcttaaaggctgaatagcattccattgtttatatacgcaactttttttttatcgactcatcagtagatggacaattaggttgagtccttatcttagctagtgtgaataatcctgcaatgaacatgggagtagagataactcttcgagacactgatttcatttccttggctatgtacctacaagtgggattgctggtttacatggaggttctatttttatttttatttaatcacatagaagactaatggcagttctatttttaattttttgaggaacctccataatgttttctgtaatggctgttctaaatttacattcctactacaagggttcccttttctccacatcttctccagcacttgttatccttcggctgtttgataatatgcattctaacgaggggatatctcactatggttttaattttcatctatttgctgtatagtgattttgagcacctttttatatacctgttggccatttgaatgtcttatttgagaatgtctattcaggttctttgcctaaatcaggctatttattttcttactattgagttcctcatatattttggaaattagccccttatccgatgtgtggtttttaaatatttcttccctttttgtaaattgtctctttactctgatgatgtaatttagtttgatgtaattccacttgtttattttcctttagttgcctgtgcttgtggtgtcaaatccaaaaatgtcatcacccagaccaatgtcatggagccttttccctatgttttcttctagtaattttacagttgtagtagatagatcttacatttaatgcattttgagttgattttcttctgtagtgtgaagggtctaatttcattcttctacatgtggctaaccagttgtctcaacaccctttattaaagagactgtcctttccctagtgtgtgttttggcacttctgttgaaaattaatagaccagaaatgcatggatttatttgtgggttctctattctattctattagtttatttgtctgtttttatgctggtaacatcctgttttaactaatatagctttgcagtatattttgaagtcaagtattttgatgcctccagctttgttctttttgctcaagattgctttggtcagggtcttttgtggttccatattaattttcaggattgtcttttttatttctgtgaaaaatgaccctgaaattttggtggagatttcagtgaacctgtagattatgttgggtagattgttaatataaacattttaacaatattaatttttcaatctatgaacacatatatctttccacttatttgtgtttttatgtctgaagtggaaaaagaagaaaaaaaatactgcatttatccctatcaaacttcagctcaggcaaactaacttagagaaataaaatataagctatagttcaattttttaaaagccttgggattttactcagcctcaatttcaatgtgaaccaaaagtctatgtaatcttaaattctgactaatacagagtttagcctatctgaagcactttactcagctctgagaaccagatttttaagagcaatactaacaaatcagtggtaagccagaagactaagtaagactgtggtggttccagaagattaaagaaactagcaataccttacctgggagaaagaaaagagggaacttgggaaaaggattataaaatagctatattttaatatttattggtattaggctcgcatttgaaaaaaaagtagcagaaaaaagaccaaagcacaatatgataggttggtttcatatacataagaattttcaaataatctaacctgtccaataacttgatggactgctttatttagttctcagagatcagaagtgttaaggcaaagactatatgtccccctgttagaaatactgttgagtagattgcttcagcaggaaagaggctagaaaacagtagtgcttctcaatctgtgatcctttgtgctagctgaagtggtactatgtatggagttttgaataggttgcaattgttgctgagcaggcaaaatgcctaacttctccaacctggcttcaacaaaatgttctacatatttatccagcttttgcagtggcttttattagagtggtagggttagggtggagagaagtattatgctttaaataaataaataaaagttcaaaaattactgaaggacctgaacaaagatctctttcaattctaatattgttattaattcctatttctcagctatatcctaggaaagtaagatcaacatcttattgagagattactgcaaataatattaatatatctgattttaaaagcctccttttcttcaataacggggcttttagagtaaagtaactgtctcagctcttcactttgcctgtatcagcacagcctatactgtgtctgggggagattttatctctctctggaaaagtttaatgttgaaaacaaatgtccttttacttcaaaaataaccagtagttgtagaaaagtagatcttagaaacacgcaaagttataaaattttaatttgtacttctgtaaaggaaaacactggaaaaattagttgctatgtaactaaatcataagtgaagagtgtactatcaaaataatcatgacttctccaaaagtaaaagcaatttgctatatattaaaataccaaaaaataggaaataatatatgaaagtcccagatgcttggatctttaaaatacctcatctcaaaagttacagattatttcatacttcctactatatatatatatatatatatatatcagtgaccacaagagtcaactgacagaaatttttaaattaacttacctagcttaaaaaattaacacaattcgtactgtatcagctttcttactatatcttagtcacacaagtagaattcttatccataaatcaactggggattctatttgcattatagtattattcagaaataacattaatggatttgattgtttagaaataattctgaaggggtgtgatctatattttgctgaagcacaactcagaagatggcagattagtgcgcaggaggcatccacttacatagtagtgagtctacccaaccacttggcatgggagtctcaacatagccttactgttcatttgctattgatagttttctattgatagtttttgtgagagaatcatatgctaaatgatataccagatcaagggaattaggttttaaggtaaaattctcatgaacatcaaggtacatcagagtctattctattccatatgctttttagttaggcattgtttataaatttatgcataaaatttaaaaatacgatcatcacacaatatagtatctaataatatctcaaaatactaccatatcctttgcttttataaaaattttattttcttataaaaggtaacattaatggcagaaaatttaggaaacacagaacagcaaaaaggacaaaaaaaacccttttaaaatgcaaaacaaccaaatttaacagaaaaaagcattagcaattttacaaaccccgttttaaattgcagagggataaatgaattcatattttttctcccatgtagtttcaattcaatcctttgctctgggcccacagtactgctcaactcatttaaacacttatattaaaacctggatgctttcagcatcaaaaagtacagaatagaattaatcttcacagtacgcctgagatgctcataagttatgttaccaaagcaagttactactactgatgtgaaactgtatcattaagattgtaaagataataaaaaacttaagtgaaaatatctgatgatcaagtttgctttaggaagaccagataatgggattaatgtgataaagttagtacttattgttactaagatttatactatataatacttcttgaattttagcaactatattttatagatctttttaatttaaagaatctaaaattcagagagtatagcttccaagttcccctttaaattgttgagaattatatttctaatgtaagtatactttttgatttaagaaaatcaaagacaagcatgtctcttacatacctcttttttaacctactacctgctaaaacatttacaaagatacctaagtttaagaaagtagatgctaaacaaataaacataatgcctggaatgcttctctgtaaattgattaaaacaccatctagtaacctttgggatgcgcttcctttcaatttaagcttttattttaattacttatggaaagtcacttttctccttgtatgtggcaattaacacaacattttcaatgcatcccagaaataggtgtaaatctgagaacagaggctctttcgtagtcacacaggccaaaagatttgacatttcacattatagaatgttggctatctaagtcacacagactgtatgatttctaaaatttcaagcttattataaagacagctggtgggaaaataaatagtacattagtgcttttaccttttagccggtggcttaaaatctgttccaaaatagctgcaaaattgttaaattcaggagaagaatcatcaattgtctcaaagcaagaccgatcaatcagggtcttcacagaaaacctatgaaaaaaagattattgttgcttttaggcagagttgattcattccctaagtatgaaaaaaatgggaggaaggcaatttggggaagagttgtaaaaatattttacaagagtataacatctgaaaaaccccatttattcaaatttactctgtaaatggaaatttttacagaaaggagtctttttattgatatatttcctatttcctctggtcagaatgtttgtgtactcccaaaattcatatgttgatacctaatctccaaagcaatagtattaagggtgggtgcctttgggaggtgattggataatgagggcagagctttcatgtacagaattagtactcttataaaagaggcctgagggagcttgtttgcctcttctgccatgtaaagacacacagaaggtgtcatctatgaggaatgggctctcaccagacacccaatctgatggtgccccgatctcagccttcccagcctgcagaactgtgagcaataaatttctgttgtttataaattacctggtttaagacaatttgttaaagcagcctgaaaggactaagaaagtatctactgaaaaaactaagactcagaaatagctaattgtccccattaaaatcaaaatgtgacctaactaaattaactccaaaatactcaaaaacagtaatactacttgtaagaaatttgagctgcagactcaaatgcttttgagagtttctgagcacaaaatagaataaaataggacgtgagcattaatgagaagaatacgtctgtattagtctgttttcacactgctaataaagacttacccgtgactgagtaatttataaaggaaagagatttaattgactcactgttctacatggctgggaaggcctcacaattatggcagaagatgaaggaagagtaaagggttgtcttacatggcagcacgcaagagagcatgtgtaggggaactctcctttataaaactatcaaatcttgtgagacttattcactactacaagaacagcatgggaaaggcccgctgccatgattcaattacctaccactgagtccctcccacaacacataggaattatgggagctacaattcaagatgagatttggatggggtcacagacaaaccatttcaacatccaaaatttttatgagcttataaatagcaaaacctgcaaatctgtaaagtgtactatatttttccttatcagaatgtcctttgtctctatttttgactgtcaaaaatcaatgtattttccaagtctcaactcaaatgtcatcttctcaatggagaattatccacctgcatattcctagcacaaacaaacattttatttgcatttatttcccttaagagaaaattacaatttatcttactgctaccatttgtgttttcaatcttcatcttattaggacacaattccttcaggcagaaccacgctttctgaactatgtatctccctcagcacctaggacaatgctttgaacgttgtacccagtaggtacctgttgatttatttgtaagctctattttgaaagaatggtaaataaatgtttaaacgtcctatcatggcaagacccaacatatagtttatgggttttaacatgtgtagattcatataaccactatcaaaatcaggatacaaaacagtcctgtcacctcaaacaactccctcatgctctttatagtaatatcctataaaggatggtatatgagtgcctaagacagtggggaatcaagaagataaggggagctgttaaagaattagaaataaaaactataaaggagataaaagagtacaagctttttttaaggttttactcttgatagttatgctattcaatccggacagaaaatacaggagacaggcataaagggaaatatagaaagatttgtttatataggttatatctagtattcaccatattagaaattgaactaaaagattttaaatataggcagtcctcacttagcacagcagtacaggaccataacagtaactctgcaagttgaaaccatgcaaaataatctttataattaagtaaaaattataattttcctgtgacctttataaatttttgtcaaaacattaaaaactttcttacaaccagttatatcgggaaataaaaaatactaaaacatttatttagtacactttaaaacattagaaacactgagaattcaagtgttttacttctctgtaagaaacttatgaagagtaatctgaacagtgcttgcctcattcttctcatttatacaacttaagatatagtgtaagcctctttttttttttgtcttttggcaaactgccatatttcttgaactagcttccaatatgttttcctttacactttcaatgctgtgaaatacctctgagaagccctttaatgtgaagtgttctgtcagtgtcacttcctctgggacattttcatcctttctgttgcaaccactttcctcatttttatatgaacatttgcctccactaagttcctttggctgcatatctagattctcttaaacaggagaaatgtgcacattcccatgatcaatgatttcttctgtaactccctttatattcatgcaaatctcactttgagcattatcattttccatttctttctttctttttttttttttttttgagacagagtctcgctctgtcacccaggctggagtgcaatggtgtgatcttggctcactgtaagctatgccaccccggttcacgccattctcctgcctcagcctcctgagtagctgggactacaggcgcccaccaccaagcccggctaattttttgtattttttagtagaggcggggtttcaccatgttagccaggatggtctcgatttcttgacctcatgatccacctgccttggcctcccaaagtgttgggattacaggcatgagccaccgtgcctggcctatcattttccatttcttttctgtactttcatctctgcaagttggccaatttactctttttgattatccattttcagatgcatagggacaaatcctagacagactttgaaagaagtgatattattggtgtctgatcatgatgtgtatttgttagttatgtaatggtttgtggactaaagagctagtggcaaaatgtgtattttatgcaactactcacaactgaattacaatggtaattcaaattgaaaccacgttattgtaggactgatgttacttaactaaattatgaaatactggaaccatgcaaagtaagaactgcctgcatttatttactaattataaacaaaataaattcattacatgttgcataaaaatatatttttatgaaacttatattttccaaaagaaaaatgtagcaatgtttacatgtttgcaaatatctttaatgtgtttaatagaagacaattagattatattactgcttttgcattcaagctattataatagcacacattatgtagcttctggaaaactccagcatacacttcttagaaaatgggaatttttaataaaaaagacaaagaaaatgacaataacaacaacaaaagagaatggaaattttaaaaggcaaataatgtcttagaatacttaagaaaataattttgactttgtggacctctgaaagcatctgggtccagaagtacactttcagaaatgccaccctatggcattcttgttgtgtaatgaaataactctcctatgaaacgagaatgatacaaattacataccattacatatatatgggataatggaaaatataatcactcaaataattttcagtcttctttggttcagatgaaccctgattgaggaatgctgagatagattaatgttcaactacatagtattatctacaacagcaactggagctcaatggaataaattatcatgcaataacgggaaataacatataggaagtaacactgataaagttagtttcttgtacctaacggatagtcaagttagacaaatgccagatgtaatgcatagtaaatggatagaaacaaaaagataaagagaaaacagatttaaaagggacttgaaaacttttatttcctacgtccatctcagtgacaatacacaagaataatgctgccaatccctggcaaacttttaataagaaataataagtacagtgtgtaggaaaaggaaatgagaaatgtttctaaaatgaataaataaaaagcacacaatctccacctccacctccacctttgacctgaatagaaggaaatttctgaatgtatttctctaatcttcattcagtagaatggaataagaaagctaactctgcatccacactgctcaaggaaggaataatctactgcttgtaaaaattatgccatttaagatagtaatgcatctccataaaatacaccaaaacttatatttgaaaacaaaattaacaaagtgcttaattcatcaaaaataaaaatctaggttagaactcaatttccacctttaacagtctgataagattttagtcactatgttctccaggaataacactagattacttaacaaactatttactttgtaaaatgtagtgggaagaaaaagccatggctattagtgcatatattttcatatcatcaagagacctatatggatcaatcagtagtcaacaaaatgcacaaatatttttctacattactcataggttacgttcctacagaagatactatctgtgtcataaaaacataaaatgtcaaatatcagagcactaaattactttaaactcaacagctaactaaaaactaaaacaaaagcgaagtccaaatatcccaaagcatatccttagacacaatttctatgattttcaagcataaagacatttaagggtgagaaagcattacaaaaatttctattatatcaaagtcagtaatgaagaaaaataatgttctccagctttgcttcatcattcatatcctgctctcctccctccaacacaacccaaaatttcagaaggcaaatcaatcccttagagtctatgcttcactttcagctaaccgattcttcccactcaatactcacttctctaaaatcatatagctagtcatgagtatatgccagagtaatgagaatctgtccttcataacacagtaactaagatgtgctataaaaatcaaacctgtagaaagaattttaatatatctaagaaatatcacacagatgctgagctatttcctgataatgatgacattaatattagtcatctgtttcctaaaaaggaatgatttttaaataatgaaatgacaatttgatgaatgtctaaaaatatcaaatcaagtctaagtaacagcttttacataaaaattaaaaatcaaaagtttatataaaagagacttataattaagattttgaaatgcagtttttgaaatgtctctatttaaaaagattctctttcccaccttcaaagtccaaggaaatttttgttagcttagaaatgagaaacaatgggccaggcgtggtggctcaaccctgtaatacctgcactttgggaggctgaggcaggtggacaacctgaggtcaggagttcaagacctgcctggccaacatgatgaaaccccatctctactaaaaatacaaaaaattagctggttgtggtggcacatgcctgtaatcccagctactcaagaggctgaggtaggagaatcgcttgaacccaggaggtcgaggttgcagtgatccgagatcgtgccactgcactccggcctgagcaacaagagcaaaactctgtctcaaaaaaaaaaaaaaaaaagaaagaaagcatgattgtgactaaaaccttaaaacttaagaaagcatggactacctttttccctttgtcatcatagcaagagaaatgagatggttaccaaaactgtttaaaacatattaattacatccatattacattaattccttccatagttcatagatttgtaacataattataattaaaaataacttaaaaattttaaatgtgaggacaaatcaaaaataattttctttaatgtctatagtttttattagaaattatttttatagtgaaaattcatctttaatatttaatgttctgcattaatatatatatatccatatatacacagagagaataagtagtaaaaaaaattatattcctatccctttacaacaagcatatattatttggccatttatccaatatgcttcaggaaaaaaaatgttcaaataaaatagatcttcttatctataccatgttatatccctttatatggaatgatatctgaagataactaatgtacatgaaaacatctagaatcatcacatttcaaaacttaaaagggctcacaaaggttaaagtcattaataagagtgatgtttttaatagaacgtaagtatccaaaatatgagacagagaactctccactatttcaaaccaaatttacaatattccttattatatgtcattgctgttagtagtctctaacacaggggtgaggtaattatcctctgccattaaaataacagtcagcatcaatgatcaacaaggagatggcttccaagagacatgacacaatccacaccaaacataatataagcagtgactataggtgataataagcacaatacccagagatatctgttcactggaaggcctattttctctcttatattttacatcagaaacacagagaatttttcagaatcaacaatttgcaggtctgggcacggtggctcacgcctgtaatcccaacactttgggaggccaaggcgggtggatcacctgaggtcaggagtttgagaccagcctggccaacatggtgaaactccatctctactaaaaatataaaaattatccaggtatggtggcacacacttgtagtcccagctactcaggaggctgaggcaggcgaatcacttgaacctgggaggaacaggttgcagtgagccgagatggtgccagtgcactccagcctgggtgaaagagcggaaacaaacaaaaaaagtaatttcccttctttcttcaaatattatgcaacttgcgaattcttggccgggcgtggtggctcacgcctgtaatcctagcactttgggaggctgaggcaggcagattgcctgagctcaggagttcgagactagcctgggcaatatggtgaaaccctgtctctactaaaatacaaaaaaaaaaaatcagctgagcatggcggcatgcacctgcagtcccagctactcaggaggctgaggcaggaaaattgcttgaacctgggaggcagaagttgcagtaagcccagatcatgccactgcactccagcctggcaacagagccagactccctgccccgcacccacacacccaaaaaagaattctcaaacatcatgtgtattttcctctttcttttctaatataattttaatctatttaaaatattttataatgagaaaaaatacctttcacatatcctttaagcaggggtctacagactgttgtccacaggcctaatacaactagttaaatgtttttgtaaataaacttttattggaaccaaaaaaagtcccaaccatcttccctgaaatttgtaccctgaaacatgaaactctcttcgtgatattttattatctcaaaaaattttacgcaatgtaaaaatcaacttaaaaataaaggaagaaagcagggccaggtgtggtggctcacacctgtaatcccaacactttgcaaagctgaagccacaggatggcttgaggtcaggagtttgagcaacaaagcaagagcccatctctataaggaaatgtaaaaattagtcaggcatggtggaaagaggctgttattttaagcaactcagaaggctgaggcaagaggacaacttgagcccaggaattcaaggttacagtgggctatggtcatgcgtctacactccagcctgtgtaacagagcaagaccctgtctctaaaaaggaaaattttaaaaattaaataaagagacagatgtgtatttaaaatattttctcaatctgtactgtcaaaatttattttaaaagagaattgttaatctagacacttaagaatggaaatactatattattaacatcttgtattgctatataagcagactgatgacagcagattgccaaacataaaaaataacgttagaagcacactcttaaaataaaaaagacagtttgctgagaatgatggtttccagcttcatgcacatgtaccctagaacttcaagtataataaaatatatatgttaaataaataaataaataaggcaaaactttccaaaaagattcatctaaaattagtaagccatcaaaccaagaaaacttcctatcttaaaatacattggtttaatctcatatgaaagaactcccaattaaaattattttaataaagaacactttatatacttggatcacatatcccttgggaatccaattattctttatccaagaacaaatgaaaatattcaaatagaatactttaacatagtgagcttcctagtaagctagacattaaaagcagcaatagaacaacgtgaagaacagaaaaaaaccataacatatagtcttcatggtttatcaacactagaatgctacgaaaatgaaaggtcccagtttctgtctatgcaaacacacacatcagctgacttgtatcacagacaatcaagacagcacagttttaaaaatatatatatatgttttgaaaccagatatatttgggtttgaattctggcaatgttagccttaactataaaataaatctaatttaaataaaaattattataattaaaatttccattattagtgatgaaggctgaatctaatatttttcctgcaaaaagcatatcgtccacgtataaattaaatatattttcttatcatgttaagatacagatgttttgtgattgatttatgaaaattttaaattgttattaatattaattttgagattagacctgaaatataacagaagatttggttctgtaaatactaagatttaaaaatcacaaaatctaatgttaaatatgaatctttggaggatattgttttcctaacctcttctaaagacaatcaccatcactggagataacagacaataaatcattttacttagctaaaacaacaaaatgtgggcatcatatccactttctttctttcataaaatattttcaaaacaatatgtattttggaggatttgtttttgaatatgcaatctagtgtcagagtaaaagaggaaggcagggaagaagagctctttcatttagtgcacattcacagctgtcggccagcttttggtaaacagtagttactgtgattgtttactgtcgcccccaaatcagtgcattttgttgttttggcttgctggaggaagggtgctagaaaatataccaaatccaagttgaaaaccctgaaaggccaggagcaaactgtaggttgttcaagactaaccatggttaaaacctagtctggattcagcacagtccctgattggatgaaagcaatcagctgctactcaatcttatggaggaagatgaacactagtaaagcaaagtggtcattaacctacactattggccatgggtactagtaaactgttggcgatatctttctaaaattaagtggtgcattccatctgtttactccactgtggtctatttctactgtatactatgttcttatgaatactttgacacaaaatggttgacaaaagggtaaacatgatagtactaaaagaacaacaaaagtattaaagaaataacttaataaacattgtgtggcattcaataacattctagatgtgacaaaagatagaacatacatgacaaagaaaggagtaagagagaaaaagcagaccataaaagtagatataaagataattcaaaattctaaattaataagaactttaagataaatgtgagtaatacattcaagagatgagaagaaatgaagtacataggtaaaaagacaggtttttaaaatcagagggttagagtctattttaaaaaatcaaataaaaattctggaactacctgaaattaaaaactcattcaatggattaaacagtagaatagacaaagcataagacataattaatgaactagaaaaggagtcaatagaaaacatacaagctgaagcataaagagaaagaagaatagaaaccatgggaaagaatatgaatcaagtgaggcctggtaaagtttaacataatgtaattggagtgtaaaaagataatggagacacacgtggtggctcatgcctgtcattccaacacttttggaggcccaggcaggaggaatgcctgaggccagcagtttgagaccaccctgggcaacatagccagatcctatatctacaaattaaaaaaaaaattagctgggtgtggtggtgcatgtctgcagtcctagctactcaggaggctgaggatcactggaacccaggagttcagggttgcagtgagctatgatcgcactactgcactccagcctgggcaacacagcaagacccaacctctaaaaaataaaaataaaaagtaaaaagaagataataaccaaaatttttccaaaactgaggaaggtaaaatggaaagggtaaatatgtggataaatataaatgtgtatttcctaaatacctactgtaaaaaaatatggtaataaaataatgtaagatttaatatatatatatatatacacatatatatataagtatgttttaggatgtgggggaataaatggttctaacactattggagaagtagtaaaagttacaatttgcattaagctgtaataaaccaaaggtaactgccaaaagaatagaaatatatataaacatatataaagaaatggaatatatgactcacaagttcacaaagtaaaaaactggaatcatggaataaatggaactataaaaatattaatatttaagaaggcaagaaaagagaaaaaagcaaacatacaatgaacagtaagatagctataaatccaaatataatagtaataacgttaattaaaatgggctaaataattaaaagactaagattatcagactacataaaatgcaaaattcaatcctatcttacctacaaggacactctaaatataagagcccagaaagagcaaaagtaaaagtaaaagatggaaaaagagacatcatattaacattagctaaaagaaagctattataactgtattagtagcagataaaacagactttaaggcactagcattattagagataatgagggacatttcatgatgacaatgaatcaaactactaggaagagaccacaattctaaatctccataaaactagtaacaaaacaaaatatttatagtaaaaatcacaaaactaaaaggagaaacagacaaatctacagtcatagaggtagactttaacacatctctctcaatactaaagagtatacaaaaaacaagtaagaatacagaggacatgaacaaggcaattaaaacactagacttaactgacatatataaatcatgcaatcaacaatgacagaatacacattatttccaaatgcatattaaatatatgttgaaattaaccatatactgcatcataaagcatcaacaaatttcaaaagctcaaaatctttcagaatatgttctctgcacaacagaattcattcgaaatcaacaaataaaaggttactaaaaaaccttcaactgtttgaaagttagacaatagatttttttttttttttttttttttgagacggagtctcactctgtcgcccaggctggagtgcagtggtgtgccgtctcttctcactgcaagctccgcctccggggtttacaccattctcctgcctcagcctccggagtagctgggactacaggcgcctgccatcacgcctggctaattttttgtatttttagtagagacggggtttcaccgtgttagccaggatagtctcgatctcctgacctcgtgatccacccgccttggcctcccaaagtgctgggattacaggtgtgagccaccatgcccagccgacaatagatttctaaataaactgaggagtcgacagagaaaattaacaaagtcataacacgagtcgacagagaaactcaacaaagtcaaacgctggttctttgaaaaagttggtaaaattaataaatgcctagcaaaataaatggggaaaatggagattataatatcaggaaagaaaaatgggaaatcactacagatctttcaaacaataaaaagacattaagaggatattaagaaaagtctcagcaaaaaaaaaaaaattgacaatataaatgaaataggtatgttccttgaaaaacctactgaaactcataccagaagacacaggaaatctgaattgttcagtatttattaaatgaattgattccgttactaaatgatttcccacaaagacaatttgcggttcacattgcttccctggtgaattcttccaaatgtttaagaaagaaatatcagtcttacacaaacttttctacagaacaggggaggaaacacacacacacacacacacacacacacacacacaaacacatacttcctaacttgttttataaagccaaataatcttaatgacaaaaccagacaagaacattataagaaaggacaatcacataccaatctctaccatgaataaatatgcaaaaatcccaaaatattaacaccctaaatgcaaaaatatgtcaaaaagacaatacatcacaactgattgtttttttattccagagtggtttaacatgcaaaagtcaacataattcactatgaaaacaacaaaagagagaaaaatcacgtttacttgaaagacaaaaaaaatttaataatacaataataagcatccatttatgatacaaattctcagcaatttagaaatagaagggaagtaagaaaaacctactgcaaacatcctatttaataataaaattttgaacgttttctgcaacactgcattagtggtcctagccagtgcaataagacaaaaaagaaaagccataaagattgaaaaaggaagaaataaaataagcaaatgacatgactgtgcactcagaaaaaaaaattttaactgcaaaaaatctgttagaattaataaagaaatctggtaagactgttagatataagaccagtattttaaaaggtcaaatttatatcgatataccaacaaccacaagaaaatgaaaagttttcaatgatttcagttaccataatataaaaatatatcaaatatgcaagaataaatataataagagatttaaaatatctatatatgcaaaactacattattgagaaaaattctagaatatttaaacatataaagaaataggttatgttcatgggttgcacgtaagtcttaatatcataaagatggcagttttcccaaaactgatttatagtaccagtgcaagcttaataaaaatcccagaaaaatattttaacagaaattgacaagttgattctaaaatttagtttgtaaaaggccaagaatagccaagataatcttgaaaaataaagctagataacttatattaccacacatcaagacataatataaagttataggtattaatttagtacgatattagctcaggagagacaaatagactattggaaaaaagaaagtctagaaacagaccacaaattatccagtcacctaagataaatgtgatgcatgagtgtagtggagaaagtatggttgatatagtttggctgtgtccccacccaaatctcatcttgaattgtagttcccataatccccacatatcatgggagggagcagatgggaggtaattgaatcatggggatgttttcccccatgctagtctcatgatagtgagtaagagctcacgagagctgatggttttataaggggcttccccctttgcttggttctcatgttctcatttttctctctcctgctactttgtgaagaaggacatgtttacttccccttccaccatgcttgtaagtttcctgaggcctccccagccctgcagaccaatgaatcaattaaacctctttccttcataaattacccagtctcaggtatgtcctcatagcagcatgagaacagactaatacaatggtctttccaataaatggtactaggtcagttgattttccttaagggaaatatttaatcttgactcctgtacttcacatcataaataaactacagatggattgttgatataaatgtaaaaataaaacaataaagctttagaagaaaaaagaatattttcattactttggagtaggctggcttcttaaagacattacagtaagcattaaccatgaaggaaatttatgggccattttacaatcagaaatttctattcatcaaaacatactacagagtgaaaaataaagccaccaaatggaagacatttgcattacatgtatccaacaaaagattcccatacagaatgtacaaagaactgcacatctaaaaaataaacaaaaagcagagattccagttgctaagtgacttgaattgccattttatgaaagaaaatctccaaatggcctacagacttacggaaaggtgcttgacttcattagacatcaagaaaatgcaaactaaaaccaccatgtgacaccccaacaaacatacaagattggctaaaatgaaagaaaatgtcaagcattagttaggatacagaacaactggaactcctacacacaatgctcactagtatgagtgttggtacaactccttttgaaaactttcacatctactgaagccgaatatctgcatgccatatgactcatcaattccactccaagctaatatcagacagaaaaatgtacatatcatcacaaaaataaatatgaatgaatatttagttagtagtagtcaaaaagtagaaacaactcagatgacagtcagtgacagaatggaaatattgtggtatattcatccaatggaataagatacagcaatgaaaatgaacaaactacagcaacatgcaacaaaatggatgaacctcacaaacataatgttgaacaaaataagctaaacacaaaaaggtctatactgtattattccattcatttaaaatatttaaaaaggcaaaacaaaccatggtgttaaaaaccagggtattaactacaagaaagcaaggaggaggtcttgatatttgaacagttctttctcttgacttgggtgctagttacaacattgtgccctaccacaaaaatgaattgagctgcatagttatgctacgtatacttttctatatggaaagtataagtcaataaaaatttatattaaaagaatagtggcatagtagagctagaaataaggctaaaagcattatcacaatgtcctacatatctcgtagtggttgactacagacttgacactaagatttctaacagctgcatgagaaaaagataaagttgtcagttatacattagtgtccagtagatacaaataaatcaattgcttgaaaatacaaattgttggcactaaacacagagatttctcacagaagtcttcacaaaaaagaagccccttttgacataataatgtccttgacaataacttcaagaccctctgtgactgcttcttatgatgaccttcagtgcagactgatggaatctttccaatatacaactgggtaaaagcagttggggatagaagagtgtggagcaatgcagtctacatacccaattctctctgatgctttggactgacccagggatatattttataaacctgtaagagggaatagaagagtgggtaagcttcaaacattcccccttgaatatcatctctcaactgaaattttgacaattatcaagcagcaacagcaaagttaaaataaataccccctagtaaaggactgggggatagctagtctctgttgtcaattaatatgaatgcagtttggttgggggaagagaaaatgaccttttgtgaatgctgaaatgtctactctaggactagtcgttgaaaagaggatcatcctacctccattgtgcgcatctactaattagagcatgaagaatccttagaaatatttaataatactgaacctgcttccaaggtatataactaatgttgaatccaaactcaaactcaaagttctactacatataaaatgactgaaagagttttagccaaaaatattataatcactatagccaaggtatgaacagtcttatgaggcatactcaagcatattcaaccaaatagtaacaaaaaaagtaaatcactggatttaaagttcttttttttttcttttttttttgagacaagagtctcactctttctcccaggctggggtgaagtagtgaatctcggctcactgcaacctccgccccagggttcaagtgattctcctgtctcagcctcccgctggaattacaggtgcccccccccccaccccccaccaccacgcctgactgtttgtatttttagtagagacggggtttcaccatgttggccaggctggtctcgaactcttgacctcaggtgatccatctgcctcagcctcccaaagtcctaggattacaggcatgagccaccacacccagccaacaaatttaaagttctttaaaggattatgctgcaatctgtatatggttggtctgcccccatcaaatgacatgttgaaatttgatctccaatgtgatggtgttgggaggtggggcctagcaggaagtatttggctaatcatgggggtggatacttcatgaatggcttggtacttatcacccactagtgagccagttctcactctagcaaggctggattggtctcaaggaagaatggatcagttcctagaagagtaggttgataaaaaaccagaatgccctttgggtttggtctctcttcacacctgcctgcttcccctttgactctctccaccatgttttgatgaagcacaaaagccctcaccagaagctcagcagatgccggggccacggtttttgtacaacctacagaactgttagctaaataaacctcttttctttataaactaccccacctcaggtattcctttatagcaacacaaaacaggataagacagattatactgtcattaatattcaataacatttcacatatctgcatttctcccaccaagttcaagcatagactagacagtttttctgattagttagcaccagaatgttaagaagttcagagttctaaagctcactaaacttaactcaggcctctgggtgctttttaaaaaaaaaaaaattaaacacctgataagtttagttatatactttcccaggtcacaaccaattataatctgcaagtcagaatgggaagtacaaagaaaagaactgctagaaataaaaagagttgtaagaaataacaaataacttggtaggaagaaacagaaggatgcaaaagctcaaagaactccaaacacataatcttctggggccacttaggcaaaagctctacatgctgcaagagtctccaagggcaaccactgcacagtgggcatattcatagaggcagattcagagtaaagtcatcaataaggattacattattctatgtatagtctttgtcaagaaggtagggaaacgtgtaatcattttttaaagcaatccatccaaaatattgtaaatattatgtgttgtggattaaacttgtgcgcttaaataaatttcagttatacaaatcctgcgctccaaaataaatgctgagtaaagcactacagttgatgaaggattttaagcttaactcaaatattagttatgtataaaaatataagcttctcattccttgactataatggaaaaactgaggtgctaatgtaatttgaaataatattcaagttctgaaataatatcatgacctatagaaaactaagactattcatatgttattaaaaacacttgaattgtgaaatcatcacttgtctccaccgtgcttatcacactactccttatattcctcttattagtccctcctagctacaaaacaggaaaattatgactttgcatgggaagtttctcttaaaagtattgacttaaaagtttgacaagtgttattctgaaatgtttatatgtgcatattttaataatttgctcataagacattgttaagccatagaaagagaatttagattttaatactctgccaccaaaaccaaaatcaaaggactatataaggttttctgtaaacaatgaagcttataaaggacagaaaaaatgactaatatctgattatctatggataaaaatgcaagttaaaaaaatctgaagggcgttaacaacttaattttctgaagttctaaacgatagagaatatacagggaaaatactagttggttctcagagccaaagtcaagtgtatgaatattttgaagttgagtgtgtaagatttagagtcctcaaatgacctactatctcttcaccaaaatctgtgaaaaatatgaaaaaacagtacttatctgatgaaataaggactatgcaaatgtttttagtctacaacatgtaaatgttcactaaaaaaaactaatgaattacatacacatatacaatcacacatgagccaaaattcaattcagctctttatctgattatcttacctatctaaacaacccactttcaaagctcaaaactatatattgcacttgaataaagctttaaacataaagaattgtgtactcacataagaagactttaaacctaaactgagaatacacctaaattgtttaaggggtaaggaaaaacattactgtgaaagtataagtggatacactagaatgatatatgctggtgactttttttttttttggttttgtaaatggttcaattttttccagaacatcagcagagaattacaaaatcaaaggcacagtccaaaatatttttgtttatagagaaaaatgcacatacgtaatttagctattataaacatttatcttatcattattaccctgctcatatttggaaaaattcaaaactaaatataaacattttttgcttggaggctattattaattttaagcctataattgaaggttaacaatgatctagtccaatattattttacagacaacaaaaatgaacaaatggaaaggttgcatggcttgtaaaagtgcacactagttaatgataaagtcaacctagaacccagttatatttccaccagatcaacttctttccaacttaaatatcaaatcatctctgatttgagatataaaaataaagaggccgggcgcaaggtggctcacgcctgtaatcccagcactttgggaggccgaggcgggcggatcacgaggtcagcagatcgagaccatcctggctaatacggtgaaaccccgtctctactaaacaaaacacaaaaaattagccgggcgtggtggcgggcgcctgtagtcccagctactcaggaggctgaggcaggagaatggcgtgaacccgggaggcggagcttgcagtgagccgagatcgcgccactgctctccagcctgggagacagagcgagactccgtctcaaaaataaataaataaaaaattaaaaaaagaattcataagagacatgagtgaaatacccagggtttggtgactctggaaagtaaactagcaataaatgcataaatactgctttattcatttttcttaatttgtcatggggatacttaaaatgtacaaatggcctatagtgactttcttccaaaaagtaaaagtcattcagacaaagcctatcatatagaccccattactacacatggataatttacatgcaccatcaactatttggatctgaaaaacagccttaatattatccatataaataacaatacaaatgaaatccagagcagaaaccacaacttattttagctattacactaaatctatgtgtaaactgtaactaaagttagcacatattcatttcacagtagaaaataataattatgtaaattacaatcatgaaaatacaactaatacagagagctgtccccagaaatcagtgtgacgttcctaaaatttcttaaagataatttaaaatttagtttaaataaggttgaaatacaaatccttttcttttcaactgtctctgataagggcacacatgatcattacatgacctaaagccagccaagacaaaaatggagaagcaaaaggaacagtacccatcactgaaattattcattcaataaatattttttgagtgttagatgctatactgagaatttgaaagaaaaaaaaaaaaagactaagcaaaaagcagatagaatcactgcccttgtgaagtttaacaaaagctgatagagcttttattaaatatgttaccccccaagaagcactgtatatgttgaaactacccttatttttaaagcaatttttgatgtctgtatattatggttaagaaaatcagccttgcttatggttccatttacctactttaaagatatttacctatattttaaaacacctaacagcctatttgtctcaaaaagttacatcctagacagcacaaacggcaaattaaacggataccatattactttaccatttacaactcaaagtgctgtaataattacattatacaaatacagtcaatgaagaaggtcttcttgctagataaacatttgtaataattcaagtattttttaaaaagtcactgtgagttattgcatttaagtcctggaataattatctgtattccacttaagatgctagacacatttttacacaagaaaaataacggaaaaatacagagaaattgcaaaggaagaaaaagtttcatcatcatctgattcttaagaggaatatcactaggtgatgattaggagtctgatggaggaaagtaattttaaaacaacttaatggctcagagaagttcctaagaaattgatgcttagggtttcaatttttcttaatactcagatataagacttaaagaaaatatatcagcatgttaaaaaccagttatctctgaatactaggcttactataaatagttctttttttttttttttgacgaagtctccccctgtggtcccggctggagtgcaatgacgttatctcagctcattgcaaccgcctcccaggttcaatcgattctcctgcctcaccctcccgagtagctgggattacaggagcccgccaccacgcccggctaattttttgtatttttagtagagacgaggtttcactatgttggccaggctggtctcgaactccgacctcgtgatccgcccgcctcagcctcccaaagtgctaggattacaggtgtaagccaccgcgcccggcccaatagtaattattcttttattgtttctatatttttctgaaggaaatactacatttacagttataaagcattaaggaaaggcaggccttaaaataaatcattgacataaagactaggtatcctccacagtcccactcttaataacaactgcagaaccagcactagcactgtagctgaaaagtggatagtacacacacgctcacatacacaatggctggcatgtagtaggcactcaactaacgtgtgaaatgaaatggctgaagataatgtaaacaagccaaaacaacgaaatgcactctgatttgggggcaacacagtaaacaatcacagtaactaccactttatccaaagctcgctgacagctgaatgggcattaaatgaaagagctcttcttccttgccctcctctttcactctgacgctagattgcacattcaaaacaaatcctcctccagccccgccccaagctctaccctccagtaccttcagcactggaactgacacaaagtccagggctgcgacggtgtccagacccgggcccctgtccaaggagctgcgcgctcacagatttggctggcgcaacataggcgggggcactgggcggcagcccatcatgcccgggacccccaaggacccgcgcggaagcccagagctctcagccccggcgggaggctggttcccctcgccctgcgctgccgtacctgcacacggtgatcaggttcctcctctccaccgcagcattgcgggcgctcaggcttttcttgccgcctccgccgccaccgccgcggatcccgctcaggccccccaggctccgggaggccatggcgggcttacccccgtgccccttttgtctcgtgccaccccgcacgccccccacacctgcttaagggggttctcgctcggtccgcaaccgtgggggcgcgggaaggatgtaggaaaggagcctggagggaggaagggtgtggaagacagcagggactcgcacccggggactgacggctcgcccttggcacccgagctccacacacacacacacacacacacacacacacacacacacacgcacgcacgcaccacctccgccctcggcgcgccgccgactgccgggctgcgcctgcgggtcggcgtcaggcgctctcctccttcccgagggacctcagcagacggcgcgcgcgcgagcccgtcggcccctcacgcccaaccacccacactccgcagccactcgtgccccagcccgggaggcagcggcaaggcccccggcctcgcgtgcgcagccccaccctctctgcgcctatcaaatcaacgctacccccgccggatccaatcgcggcaccagaggggcggggccggccgcgcggaccttttaaagcagcgggctcaagccccgccccgacgcgtgggctgctgtcaaggacgctgggctcgctttcgcagcccgctagctgccgccagtagccacacaggctagccgcggggattgtgggatgcggggccccacagcgccaggggcctattgccccccccttgcctgtagccaagctttaacggctgatacctatttgcgtggctgccgtagcttcagtgcctgcctagaaagcagcgcgccggctcccacacccgaccttgggcctaagtactaagaagggaggagggttccttttgtcctgacgccctcccaggggctaataaacagcaacacaatggcccgaggggggaattgctcgtagaatctccttcttggcgcgtctagtgccgacatttcttgcccctccacaccatgtcgctcccacctcagcctccagcgcagcccgcacccgggactgacggcccgcctaaggaggagcgtggtgccagtgtagagtcttttcgcgtcctgggccgtgactccggaatcgggagtccgggtctgggaatagtaagcccaggaacgacgcggcctcggtccagctgggctgctccctcagagtcctggaacgccctcctcgacgcgcgtgttcggaagcgcccccttcctagagcttctcactacccaccgttttacctgcaggagggtcccagcttgggtcaggtcctctgacactcacctacgcctgctgttcacctccctttgcaccaatatgcccagattttagagtgcaatcctaaatgacttactctccctatgggacctagcacagtgctgtacatagaacaggttctcaataaatgtttctcgaatttaatttgaagtcacatttgacataatttttactgaaatttcacggcttcagtggctccaaaatccatgtatctttcacctctacttttgaagtttctgtcaaagaatgtcagagaatatatagttttgtgtggctatctctatttttcttatatattatccctgttaatgcagggcatactgttactcttgaatgttttaacaacgcacgtttgtgtaataaagttgtaaattcctaatttctgaggtttttaaagtttaaaaatctctatttaaaatagtcaaaaaatcatccttttcagctaccatgtctaattttattctactattctgtttagtagaataaaaatatatgggctgggcgcggtggctgacgcctgtaatcccagcactttgggaggctgaggcgggcggatcacgaggtcaggagttcgagaccagcctgaccaacatagtgaaaccccatctctactaaaaatacaaaaattagccgggtgtggtggcacgcgcctgtagtggcagctactcggtaggctgaggcaggagaatcgtttgaacccgggaggcggaggttgcagtgagcggagactgcgccagtgcactccagcctgggcgacagagtgagactccatctctctctctctctctctctctgacatatatatgacatatatatgacatatatatgacacatatatatgacacatatatatgacacatatatatgacacatatatatgacacatatatatgacacatatatatgacacatatatatgacacatatatatgacacatatatatgacacatatatatgacacatatatatgacacatatatatgacacatatatatgacacatatatatgacacatatatatgacacatatatgacacatatatatgacacatatatatgacacatatatgacacatatatatgacacatatatatgacacatatatgacacatatatatgacacatatatgacacatacatatgacacatatatatgacacatacatatgacacatatatatgacacatacatatgacacatatatatgacacatatatatgacacatatacgacacatatatatgacacatatacgacacatatatatgacacatatatgacacatatatatgacacatatatgacacatatatatgacatatatatgacacatatatatgacatatatatgacacatatatatgacatatatatgacacatatatatgacaatatatatgacacatatatatgacaatatatatgacacatatatatgacaatatatatgacacatatatatgacaatatatatatatatatatatatgtctcagcctgggcgacagaatgagactccatctctctctctctctctctctctatatatatatatatgtacatatacatatatatgtacatatatatatatatattcctctctctctagccatacgtatatagtgtcagtcttaactaatgtgctatgataaatattcattcatacattaaaattttaagaaaacaatttagtcagactttacactttatctttcaagttaataaaagcaggcgaaatttctatatatggatgtttgtgactagtcagtgcacttcttccagaacattacgtgtctgctctcctgtgacacggaggcttataaagagtcttcttttcctaggagctacaacttaacttgtctcttcttgctagttcaacagtttggattcagaagtagccatcaggaaacagatgcactggttatgcaggcagtctcagcaaaatatttgcgctggcaatgacaaatactactcaaattgatgttgttattatttaaccacagataaaactgcagaaagaaaagagtggaaaaccatcagttatcaataaaatttctaaaaaccgatgcttgggtgtgtcgtgagtgagggagagaacacacatgcctctgaagcatttatcaagaagataaaagtgagtggtcatgacagaacgagaaaagtgagatgttaatatcctcaaaattggcttcctagcctccagtacatgttcatgttattttcactgtgaactatgactgaaaacttagtaaaactccatcttaaatgatgaggtaatcgtgttatttttcttttttcttttttttttttgagacgcagtctcgctcagtcgcacaggctggagtgcagtggcaggatctccgcttactgcaagttccgccacccgggttcatgccgttctcctgcctcagcctcccgagtcgctgggactacaggcgcctgccaccacgcccggctaatttttttgtatttttagtagagacggggtttcaccgtgttagccaggatggtctcgatctcctgacctcgtgatccgcccttctcggcctcccagagtgctgggattacaggcgtgagccgccgcgcccagccataacgttatttttcaaatgttactcttagaaggatttagttgacatgttagtacttgcttaccaagactttgccataaacaagctgtgtttttcttttttgttttgttttgttttgcatgtatggagtgtcattacactgccacatgggggccttatttgataaggcttttctcatttatcctaagtagtatgtcctgggtctctttctccctctagattactaatctggatattgtcaatcaatttattcagtacacagcataatactattatagaactccatgagtccacgttactttttggacttcttttggcacctatttcaattatttttatttatttaagcattgcacaaaggtattcaaagattttacaaagagtcacagtaaaaattatgaaaacagtagatacctaaattaacttataggaattctgtagaaccgaatgggcagaacatacccattcaccgttttcccaacttccttcttctcatcgaaacagacaaaattacaagtgcaacatataaaatgtcctcaaatataaaatactataaaatgtatatataaagtgctataaaccagagagatcaccaaaccatagtttattctagtctcagagaagtggactttttaaatatgccataaacccagcatctgtacagaagaaactagaaacattgaagatgtaagtttttttaatttttatttactttgacgtcagatgggtaatatgctgacatcataacaaggattgggtgaggcacgtctcacatgtgtgtgaaagctcaatcatcacgcttatgaaccacaaatggatagatataaattttttcaaatccacaaatcaagtatcatcataagcaaagtcaaaagtaaatgagaccgagaaaacatttttaaaactcaaatcatagacaaagagctaatttcctctataaaatactcctgcagatcaataagcactgtttcagtggcacaatgaatgtgaaagccaaattccagtgagtaaaaagtcagtgggaagtgagtatcacacaatcttaaaaagttatgaaaggggagaaaaaaagagtggtggtatgggggaatattgaacagagggacattggtgttttattgctatcatgtcattatttttcacagaagtgacttgagcatattttgaagctgatgcaatgaatctactgggagggaaaggttagtaatgcaagagagaaaaaaaaactatcagaagcgagcatgaagaaaatgtatgaaaattgctttaaaaaaaaaaagtccatgtgagagtaagtcaagagaagcagaacactcaggggaggtatgggtttccgttgagaagaggaagcagaaagaccattccaaagaattggagaatgcaaggtagtattggtcatagagcaaaagttccagagagcatcatggaagggagtgcagacagggtcatgggccaggaagcgcgaagcgtgctcattaatagggtatggatagtgaggtgggtattacaggctatgacagacacataatgaagagtaccttgatgggtctcacaaactgttctctgtaaaaagtcattgggtaaaggctgattgaaacaaagtggatttggtcctacagtttctttgaggagggcaaatactgaccctcagttcgaacagaggatatttttctttttaaaattttttatcatgtagaagggcattaacaaaccagaaattatagactccagacattgtatgcattgcatcaattaatcatcagaaccgttctctaaagtaagtattattatattctcccatttacaaacaaggaaacagagacttggagacattaagtaacatatagaaagtcacatagtaaatggcagagccaggattgaaatctaaatcattagctagaaaatctattatttttttaaatttattattttaaagacagggtcttactctgtggcccaagatggagtacagtgggtaatcatggcttacctcggccttgaactcctgggctcaagggatactcaaagggcttagcctcctaagtagctgggactacaggcatgcaccaccacagctgcctagtgttttttatttttaaaaatgttttactgagacaaggtctcactatgttgcccagattgctcatgaactcccggtctcatgcgatcctcccttcttggcccctcaagtgtggggattacaggcatgcaccaccatgactggcccataatttattgttttttctaacatgtttcactgcctttttgagaaagtaactccagataaggcttaaacacaaaactcccatactgtacacatagttcttaagaatcaagaaggattttacacactgaccaactgtatcactcatgcaatatagtctctagataattctggagctcaggctttcattttttattcagaaagtgtattctgaatcaaaagatatgcataattttaaccacaaattaaattttttcctagagatgttttaccaatttacatcctactaacagtacataagttttcttgcactcttgctcactctagggactattgttctttttatttttctgcataacaagcaaagagcaatatctttttgatattttaacttgtttttcattagtaatgaaaatgcacatttattttgtgcacttattgttcatttatgttttgcccgttcatgccctttacccatattttccaaaaaatattagtcttcattatagtggctcatgatcatatttgtttattgtatgtatggcaaatacttttcccagttcgttgtttgccttacctatggtgtgagttatttataaagagatgtttaaaaaattttatataaatgaaattcatcaatattttcctttattggtttttcctttgatcattttagaatagcctttgccacctccaagattatatactttatggttacttttttatatcaaaaatagttaacctatttgcactatgtgaaggtatgaaattagaatataacttcattgttccaatgattaaccactgtcccaattctatttattaaatgatccatctttgccttactgccaatattaaatttatcatgaaataattaaataacaaggttgcattttaataaagaattgtgcccatgataataaatccatagaaacagctaacattaatgtttcacaacaactttttttggataggtctccagacatacaaaagagaaatatatacttaattttacctaaatcagtttattctacacacagtcaatatattttctcaccaatctgttactatgtgtttgtatttgtttatgatttgtttcccatagaaattttgaatttttatgcaatcaaattttcgtttttttaataatttctggttttcacacaatgtttagaaaagcttctgtatggtaagataataaaagtgtttaccaatttttctgtagtgtttttgcattcacatatttgatatttatagagttatctttgtgtaagagtcaattggtgaaagagcctaatttttccaaacagtcaatacttatctaatgctagtattaaataatgcatactttcccactgatataaaatgctacctttgtcaggtactaaatgtatacaattttagtctactgctggattttctattttcatccattgatttatcatttatgagctagtggtaccaaaatctaataagtggcaaagcctggtaattatttttaacatctcgtaaggttagtgttccctaattattctctttcagaatgttcttaggtaattctggaatgtctgttcttccatagaaacgtaagaatcattttgacacatctctctcaccaagaaaagcctatagggattctaattagaattgcatgatatttatagattaggtaaaattaacatcttcccaatatttgcaatgatctaagatgacagtatgtctatttcttcacattttttttttatttcacttggtggcgtttcatagttttatcatggagtttcggactggtattatgagtaaggttttttgtatgagtagggttctttttttccactacacttcctaaatagttgcaatatttacacaggaaagctatacatttttgcacaatcaccttttaacatgtatttattgtttttaataaattttcagattctgttggtttgatttttatgcagtcaaatttttgtatttttacttttataatttttggttttcacatgaatcttagaaaagattttctgtgcttagattataaaagtgtttacccattttttgttatgattctgttggttttctaggcactagctcagaaaaataaagattaatggtgaagttagtggaacaacacgtaaatctctttaacattaagaatttgctttcaaaactaaaatactggaataccaattccacgaagtaattttctgtaaattatctcatgcaacggattcaaatgcaaactctttagaaaaaaaaaccctattgaagatattttggcaaagactaaacatcaattagaaacgagttactcgcctgtaatcccagcactttgtgaggccgaggtgggtggatcatgaggtcaggagttcgagacgagcctgaccaccatggtgaaacactgtctctactaaaaatacaaaaattagctgggtgtggtggcacgcgcctgtagtcccagctactcaggagggtgagcagaagaattacttgaacccgcaaggtggaggttgcagtgagtcaagatcgtgccattgcagtccagcctgggcaacagagcgagactctgtctaaaaaaaagaaagaaagaaaaaaaaagaaaagaaaaaaatgagttactcacaaacgtctaaacaggattttcagctatgatgtcaagaaaaatcttgttttgatttttcctatggatagactaaatgagactttttctcataaaataatttttaagaaaatgttccctcaataatccacaagcaatctctcagtaatccacaagtaatctttaagaggattaaaagacattttagtaccaatttactatatccacggctgaattctgcttatgcaagcttaaaatataacaaaatgacaatgatattaatgatcgccccttgaactttcaggatcaaaatatgtcaaaatgacaatggcattaatgattcctcttgaaatctcaaggtcagtttattcatatatatatatatatacacacacacacacacacatgtgtttgtgtgtgtgtatatataaaaataagtttacagtcagtacgatttctgcttagtgttcaaaaattggacagcagcaatcttcaactcataaatttggccaagtatatttacctgtgtcaaccaataaaccttagtaagaaaaagaagaatgttgtggttatcattcagatatttgtcaagtttactttttttttttttttttgagatggagttttgctctatcacccaggctggagtacagtggcacagtcttggctcactgcaacctctgcctcctgggttcaagtgattctcctgcctcagcctcctgagtatctgggaatacaagcatgtgccaccatacccagctaatttttgtattttttgtagagacggggtttcggcatgttggccaggctggtctcaaactcatgacctcaagtgatctgcccacttggcctcccaaagtgctgagattatgggtgtgagccactgtgcccagccaagcttacatttcattcattgtggtttatataattgaccttgatagtgaggttaatatcttctcaaatatttactgacaaatttggaagccaatgtttagcagttatattagttttctattgttgtataacaaattacacaaacagatggtttaaaaacacccatttattagctgaaagttctgtaggtcagaagtctggcacagcacaggtgggttttctgctcaggggttcctaaggctgaaatcaaggtttcagttaagctatgtcctcaactggagactctgggaaagaatctacttccaagctcattcaagttgttggtagaatcccattgtagttgtaagagtggggtccctgatttccggctggcttttgactgagtgttgctgtgaagcccattgcatatggcttcctccatctatcaaatttcatgattcaaatttctgacttcttctacccctaactaaagaattctctctgcttttaaagggctcatgtgattagatttcgcctacctagataatctccctatctcaaggtcaactgattagtaaccttaattacatctgcaagatccctttgctttgcaaagtaatgtaatcacaggagtaataccagggagccaagatcataaggaccattttagaaatctgtgaaccacagtggtgaaagaaggaacacattctctacagagatgtatattaagtgtctgttaacctggcattgtcctccccaaccaaaactatttctattgataggcttataggaatttggatacagctaaattcaaagcgactattaacctcctggtagtctccaagactatcagcctactggtagtccccaaacatttgttgtatttatttattcaataaatattttttagttgcccattaagtgacagacactatgctatactgtgggtgtacaatggtgagcaaaaattcctgctctcatagagcttaagatttagatgggagagagaggtatcaaaacctaaagaaatcaacatatacatatttataccgtatgataaatgttccaaaggagagaagaacatataaaagaagttggggcaggactccaggaggcactattcctacagaagataatgtcaacagggcccccggaattagacaacactcttgccctgcaagggtgccagggaaggaagtaatgactgaattctggtatgaaggaagaataggagtgaactaggtaaagcagctcgaggtaggagaaactatccaggcagaggaagagtatgtacaaatggcctgtggctggaggaaatacactgtgcctgaagttaatgtggctggagctcagagagtaaggaggatcaggagagtatggctagacagaaggccagagaggaagataggatttgttttattcacaggctcactgatcacattaaacattttcatctttatcctaagaatgttgagaagcccttggaacagtttgaaaccaaaggcttacaagatcagatctgagttttgaaatgctcattctggctgccatgtggagaatggtggagaacattaagtacaaactgctgccccaaaatgatttcacagcactccgaatgcaagatttctttagcttccctaaagacttaggactacagtctttgtgattggaagctctagttcttgttttaaaactttagtaagttcctgataataggtggcagtaatgtgcaatctcatgtactgagcctagttgtactctacagaagaagacaaacaatagtcactctgctcctttttcaacaatgtgctgtgttttgcctcagatggaaggacacatgttgtcattgttaaatgttttctaaactttaacacagtgaggttctcagaaaacatctcctttataatatatggggatccttgacatacacattaccaaagttttggttttctgggactttgttatcttctatcaaaaagaaaagtacattggagaacagataagaattttttggacaactgacaatgtttaaagggaatatctgagtataagattgcctggttatgcatgagttctctcttcccttaagtgaaatttagcaaacagatccatgtcttcaaccacttaaaggtatccaagtcaacagatctagataatctcattttactaattttgtgattcccagattgcaggctcaggaagaactctaatttcatgggctacatagaatatataacccaaatcaacttgtatcccactcccatgagctcatctctcctccccttgtcacacaaacccattccctactaggcctcaccaataatttgtgcaagtttgcttgctatctcttagatgaagagacagaccaattctagctgcccttatcataagggaagagaccaattggtttcttatcacaagagaagagaccagttggtctctagaccaattctagctgcccttatcacaagggaagagcatatacaaatggctcttagttttgctcttcatgaattatatgaccttgggaaaactgtataatttctatgtactttggttttctgatctctaaggttgggataataatgatagtacatatggtaatttcacaggagctgggacaagataaatgagtaactaatgaaactctgatatttacctggtggggagataccatgatcataaacgaaactcttagggcatgatgtgtagcaagtgctgcagaattgttagctgttttcattagttgtccttccttaagatattccagtgaatatcaagtctgatggcttggcaagagctccatgattttgaccttaacattgtttctgcttaaaacaaaacaaaaccaagaaattgtgtcagctccagattgcacaaaacatccatcacttcttatcacatatttccccttcttcatagtcttataacaaacgctttatagtctttcaggtttgacgaaaaaggtttcttggattatcttcatgcttttcttatatatattcactctgcacaagatgtccaatgcctcacaatgcagaaatcacaacaaactaacaatagcccagaatactgatatttaagatatcttattattccgagtaatagacaataccattttggatataaataacactcaggtacataattttagaaggtagatgcttattattttataccactactataaaatataactttatgttaaaatctaccttaaagtatcttatactaggcaatagctataaaggtataaattgtaccttctatttactatgaacttaagtattagcaaagccacgcatgagcttgttatgctctcctcaatgcttgctttctcagtcttctgaatatctcaccatccccatcaggaaaaaatatttggtagatttttactctctgtagtttgtgttcaaaaatcatttttttccaataggaaatcagattaaatgcacctttcaaacttaaaccctagagattctgatatggcttcttacccttcttttcctttctcctttgatcacttcttattaataggctattttaacaactgtatcacaaagtctacaaattatattatcatggcatgtaaggccttttgcaatcttgttggtgctaccctcaaaatatatccagagtctaagcacttttcattattcccactattacactcccctgggctcacctggatcattgaaacagcttcccagcttccagctgtttctgcccttggctccctacagtctgatttcaatttagtagccagagtgatgagattatgttacttctctgctccaaactcttcaatggttttctctctcactcagagtgacgaagtcctcaagatagcctacacatcctgcaggatctaaccatatgtcacttctctgacatcatctcctactgctcttttcctttggttacaccactccagccacactggcctcttgttaactctcagtggactaaacacacagcacaaccttatttatccattaattgaaccaatattgaggaagcccttactctgtgtagaggcttttggggattatagaagtggacaagatagacagagctccttcctttgtgaatgtatagtgtagcaggagagataagaaacaatgcaataagaataaaaggcaaggctgggcgcaggggctcacacctgtaattccatcactttgggaggccgaggcgggcgggtcaggagatcaagaccatcctggctaacacggtgaaaccccgtctctactaaaaatacaaaaaatttagcaggacatggtggcgggcacctctagtccagctactcgggaggctgaggcaggagaatggcatgaacctgggaggcagagcttgcagtgagctgagatggtgccaccgcactccagcctgggcagcagagcatgactccgttccccggccccccccaccaaaaaaaaacacctacacacacaaaaacaaacaaacaaacaaaaagaataaaaggcaaaaccattagtaattattataagtacctaaacatgctattaaactggatattagcaggagagacaggaaacaatgtaacaagaataaaagccaaagccaatagtaattctaaatatctaaacaggctgtctattaacacatctcagtttgctttattttagatcgcaacactcttgttacacaagattcatcttgaaaaatatctttatttaatctgatgctttgtgatgcaaggtcatgaactgaaatgccataaactagaagatgctgtaatctatcacacataaatattagtcaagcttgtttctttccctttctttctctttctttcattctttctctctttctttctctttctctctttcttctttctttctttccctttttctttcttttctgagatagagtcttgctctgttgctcaggctgtagtgcagtggcatgattgctcactgtaacctcaaatttctgggcttaagtaatcttcctgcctcagcatccctagtagctaagaatacaggtgcatgccaccacatctggctaatttgttaatttttctttagagacagggtctcactatgttgcccaggcttgtcttgaactcctggcctcaagcaatcttcctgctttggcctctcaaagcactgggattacaggcatgagattcttcactcatcatattataattattttggtttatagtagagaactaacttcataaagtaaaaaaaaaaatacaatatttagaattgtttgtccaaaaatagaggatattaaatattatcataaaactaaaggataatttaacacaaaccaagtttgtctagattaataaataagaataaactttccaaaactggtaatttctttttatagatccatttttgactaaaggaacataggttttatggctaagggaagtattttaaaaataatctcaacttttattttagatacagaaggtatatgtgcaggtttgttacatgggtatattgtataatgctgaggttaaggttatgaaagatcccatggcccaggtagtgagcatagttcccaatagatcaactcttgctcccctccctctctccctctttagtagactccagtatctattgttgacatctttatgtctgagtacccaatatttggctcccatttgtaaatgaaagcatgtggtacttagttttctgtttctgtgttaattcacttaggataatggccttgttgcagcaaaagacatgattttgttctttttttatggctctgtagtattccatggcgtatatgtgtcacattttctttattcagtccaccattgatgggcatcttggttaatcctatgtctttgttattgtgaatagcactgcaatgaacatataagcacatatgtctttttggtagaacaatttattctcctttgggtatatacctggtaatgggattgctgggccaattggtagttctcttttaaattttgagaaatcgaaagtccttgccagagcaatcaggcaaaaaaaaaaaaaaaaaaaaaaaagaaataaaggacattcaaattggaaaagaggaagccaaattatctcatcaatgatatggtcttatgcctagaaaaccctaaagcctcctccaaaatacttctacatctgataaataagtttagtaaagtctcaggttacaaaatcaatgtacataaatcagtagcactgctatgcaccaatgaccaagctgagaatcaaatcaagaacccaatcccccttacaatagattaaaaaaaaaaaaaaaacccaccaaaacctaggaatattcttaaccaaggaggtgaaagatctctaaaggaacaactatgaaacactgcagaaagaaatcatagatggcacaaacaaatggaaatacatcccatgctcacagattagaaaaatcaatactgtgaaaatgaccacactgcccaaagtaatctaaaagttcagtgcaattcctatcaaaataccaacatcacttttcacagaattagaaaaaacgatcctaaaatttatatgaaaccaaaaaggaacacaaatagccaaagcaatcctaagtaaaaagaacaaatctggaagcatcacattacacaacttcaaattatactatacgattatagtaaccaaaacagcatggtactggtataaaagtagatatatagaccaatagaacagaatagagaccccagaaataaagccaaatacttacagccaactgatctttgacaaagcacacaaaatcatgattggggaaaggacaccctattcaataaacggtgctgagaaaattggatagtcacatgtacaagaatgaaactggatccctatctctcatcacatataaaaattaactcaacatggattaaatacttatgtctaggacctgaaaccataaaaattctagaaggaaacctaggaaaaactcttctggacattggcctgggcaaagaatttatgactaagaccctaaaagcaaattcaactaaaatgaaaataaataaattgtacctaattaaactaaaaagcttctgcacagcaaaagaaacaatcatcagaataaacagacaacctacagaatgggagaaaatatttgtaaattatgcattcaacaaaggactaatatccagaatctataaggagctcagacaaatcagtcctgccactcactttgcaactcattgaatcttagttccctcttctttaaaatgaagataatcataatactacctgtgccaagattcagtgggaaaacctgactttagagctcaataaaaattagttgttttattttctctcctcaagtgtattagaagctcctttaaggtcaataattaaatttatctctatatctagcatgctcagtgcaattgctctataaatatttgttaaatttagttgttataaaattcttagaactggagtgcagaagccatctgcagcatgctatgaaaatctaaaataaaataatgtaataaaaaacaattcctttgagaaacttcataccctgattattttatttgcaacagatgcataaaactaaaactcaaatctgcataaatcaagtagttcagacttgctgtaagcatttaaaaatatatttttaaaatacatgctattttctagcaaagacatgtaatcaacctaggtgcttattaacagtggattggataaagaaaatgtggtacatctacaccacagaattctacacagccctaaaaaaaaaaaaatcatgtcctttgcagcaatgtggatgcagctggaggccattatcctaagcaaattaatgcagaaaaagaaaatcaaatatcacatgttcttatttgtaagttggagctaaaccctgggtcttcatagacataaagatgaaaacagtagagacttggaacctaaaaaggagggaagaagggaggagagcaagggctgaaaaacatcctaatgggcactctgggtgataggatcaatagaagcccaaacctcagcattatgcaatataaagcctagaaaagctccaaggagctgacagaagactggtgtggatggatcatgaaggaataaggggagaagtggcctgaggctatagaggtaagcagaagacagattattgaggacctttggaatagaacctgagaacagtgggaagcccttgcaggccttacccatggatatgatatggtcctatgtagattttacaaatactttggctgttacgaagggagttaattagaagaagaccagagtaaatgtggagaaactagttaaagtagcccaagtaagagaaaatggatggtggatatagtggtttggacagttattgtcattgttgagaagacgctggattcaaattggatatagagagtaagggaaaaggggatgctagcaataacctctccccttcctccaggtttctgacgcaaagtaaatagtggtgttatgtacttagatatgcatgctgaatgagaagccaatgtgggggcaggattaagagttctgtctgggcagttctcaaatatgagatgcatagagccacccaagtggcaatttctgcaacataatttttataattatttgtcttaaacagtaacaaagatgatggagaataaggaaaacttgactatagtagagtaagaaggtttgcctttgccacatgatgcaatggtaacaaggataaacccagcctgcatgactactttggttgtaatgcatagcattcgagtaaaacaaaaagaacaggccagatgcagtggctgactcctgtaatctcagcattttgggagcctgaagcaggatgaacacttgaaagaggattgccagaatgtcaagaccagcctgggctacacaggcagactctatctctgaaaaaaaaaaaaaaaaaaaaaaaaaaggccaggtgtggtagtatgtagtcccagctactctggaggccaagatgggaggatcacttaagctcaacagttggaggctgcagagagcaatgactgcaccattgcaatacagcccgggtgaccaagcaagaccctggctgagaaaaaaaaaaaaaaaaaaaaagaaagaaaaagctagttcgtacataagaacactgcagtatgacttgttgccaattagaagaaacacaactacaaggtcagggcatattattcaaacagtagagacaatacagtcaaatatttggcagaattacaaaatatctcattggaaaagacacgcaagggaaatcaacaaaaagatatgaatcagaattcatctgtgtctcaagaaaaggtcatgcgataaattaagttctgctagtgtttctacactaccgttagcctcattaccttattttttaagtgttaatatagttttaggtattttacatacatttttattattaattacaaccaaagtgcaacttgtaatagcaattccttcacattttttttttcaaatcttgcaccttaaaatccacctcgggcctcagttggccagctttggtatctgatacttggactacagataccactaaggcaagtagataaaatgtactctaggacctacagcccttctgctagatcctgaagaatgatcattaaaacaagctggtctagctggtcaagagcaaaaataaaatcaagatgacagaaaattgatgcaaaagtgaagtaaaatagctagagaatatgattgcgcctgtccccttagcatggattcccatgctagccaatctaaaatcctcactgttagaatcctcctgtcaatatgatagaatgaacagcaagctcagtgtcagaaaacctgtgttgttaacttggccctctttctagctgaatgtgtgtttttggtcaagttctttggcatttcagagactcagagtagtgaaggaagtggataagatgacctctacattctcttgcaagctcaaacatctatgaatccagagagaaaaactagagcatgaaattaaggttattttaaagaaataaccttaaaattattagtattcgaggatctccaatatattcatggcaccactcaaaactttccttctgctctatcccgtcttggctcaaagttatctccttaatgaggtctgccctgactatcctacttaaaattgtaaactttgcccacctggtacttccactctctttcccctgctctgtttttcaccgtaatactttactctttttaacatacaaaatcacttatttactgtgttgttatctatctgcctactcttaccatcaaatataagttctacctaggcagggatttttgtatgttttgctcatggatatatacgaagcacttagagtaatatgtgacatatacagggtacttgattaatactgttgagtgaatgaatgagtttccaatacaaatttaaaataaaatatttcctaacttaaaattgtaaagtcagatctaaccaactgttcattggtctgctagcagtgtttcttgtatatggaaatatattttaaatagatatgtcctgtgaaataatactaagtgttctaaagaaataagtgagtgaacgttacctcattgaactaacttgaccttgctcctgggagagagttcatttgagattaaacaagttcaaagtctatgaatcataaaacgataaaaaaaactaaaagggaaatggtgtttttataagctctgcaattcaaaagccatttcgggtaatattgttatttttatgtcaggaattcctcagtgctgatatcttagggcaaagggtttggttataaattaagagaatgaggaaataggtacatagtaggattgttccaaccaaatatgtgttgaatgtcaaaggaatttccctgaggaataatcttcagaataatttgctaagcacaggagaaaatttggcttattactttatagccagatttcatttttaattgaaacttctttcaagcaaatcacttactagtctattaacaataacaacataaacacaagtaaacattcggaatatagacatccaggtactaagctgattgctttacactcactgtcttattttacaagtaaggagttttagttgcagcaaaagaaataaattttccaatgtcaaatgaccagaacttaaacccaatctgtttggtgctaaagccaatgttctttactgcaatgttgggttatcttgtttctaaaacttaaatttatcagtaaaaggcaaaatttgctattattgaggacattaaaatcatatttttgtagactctgaggacaaatccaacaaaaaagttccaactatttcttggcaggcatcattgaaattggtatatagcttccttgggtattgactttgaaaaggaagttggtcactttagatatataagttcagtctgtttgtaaaaacaaaatgaaaacaaaacagttgccttatatgctaaaattatcctaatcgttttcacctttaacaacatatacacacagaacttgaggaactttacacggctcatcttcatattgtcagcatctagcaaagtacttgccacatagtgatcaataaaagttttagccagcctgggcaacatagtgacagcctatctctacaaaaaaaaattagccaggcaaggtggcgcacacctttggtcccagctacttgagaggaggatgtggggagatcctttgaatgcaggaggttgaggctgcagtgagctgtgattgcgccactgtgcttcaaccttggtgacagagcaagaccctgtctcacacacacacaaattaagtaaagaaaaaaaaaagaatcaaagaaaaaaataattccccagcttaagtccatctttatttgtttggataagctataaagtgtcaaataatgctgttaatggacatttctctagctctcccaaaggaggaattgagcacatagtatgtgctgtattttatatacagaataaaaatagagacaagatttctaccctcacagaacttaaattcttcaggagaatgacactgaagtccttaattggacttctctcttctgtattatcttcctcaagtggaggtatatggtgcttagttatgaaaaatacctccagggctttgatcttctcaataactctttgaggctgatatgaaaacagtaattagaaaaaaaccatgtatccaacttatatagacagttgatgaccaaagctagaatccagttatttcagcctcccatgtattttcttattacttaaggagaatctctatctctacctctttctctcttcttcctctctcacttttcttagaaacatgggtaagattttcagaaatatgagaaacttattaataaatgaaaaatactgggaattctcaatgtttcttgttttagccagttaattttggccttcattcaatgtgagtgtcccttaataaggagcaaactccactgagagatagatactaataaccaggattctgaaaatgcattctcatccccatctccaaacttttataaaaaatattataaaataatacacttttaatataggaaatttctcaaatacagaaaaaattaaagtaaactcagacctaactttcatcactaaaagataatcactcttgacactttgatatctttatctctaatattacaccaattaatttgcttgatatagtgaatattatgctattataattttcccctgccttttgtccttgcatattagcataggtattttctgaggttatcacaaactctgtaagcacgttttatattactacttttttaaagaggatgtataataattaattcatccatatatatgtggttaagtattcaggtcactgctcatttttcactgttataaaataaagcagcaatgaatacctttggctgatatttttttctgtacttggaattatttctttaagatagatttcctaaaattgaattactgagtcaaacagacttaagttttccttatgtatgtttccttattcatttgaataattttcaactcctacttgtttatttaactcttgtgagcatgtgatagtctcatttttcaaaatatctttgctgttgtaatttgcatttctttgtagttagcatgaatatttcagtatgttttcttctgtgtaccagtatactacatacttttttatatgaattgcctatttgcatcttttgctcggttctattagacctttgaattttttcttatccatttatataagctctttatatattaagaatattaacctattgtgatatttgcaataaatagctatatggtttgttgttggttttaaatgtgaatttattcaattttcttcataattttgttgtttttatagatttctttaaaagtaataaaattattgccatattattatttattttcaatgtccattactagccctttccagtcatcacttttactctcatgttcttaatttttattcatatcttggctccattgaccatctttattaggatatttgggaaataatacaatttatactaaacacacatcaaatcttaccttattttcttcttacaaaaaccctaggaatatgctgtttttgtctttatttgaatgacacagaaatcaaggtttttgagcagtggagtatttcttcaaatgacacagaaatcaagtcttttgagcagtggagtatttcttcaaagccacacagctagtaagtcatgaagctggaattccaagagttgccacttcattttcttctttccctttatcttactcagttgtcttctctcctcttaattttgtcattcatttaaaaacatttcttgtgctattatggtagatttattttaatagggggcagtgacttactcagagagatgattctctaatggagttttaaagatcttagaagttgatagaggaggctgggcgtggtggctcatgcctataatcccagcactttgggaggctgaggtgggtggatcacttgaggccagaagttcaagatcagcctagtcaatgtggtgaaaccccatttctactaaaattacaaaaattagcctggtgtgctggtgcactcccataatcccagctactcaggaggctgaggcatgagaattgctggaacccaggaggcggaggttgcagtgcgcctggattattaacactacactccagcctgggagacagagtaatactccatctcaataaaaagaagttgataagggagatagttcatggcaacggatctttgaaggcacgctaatgataacttaggcatttagcctactagtgtaatttccataaatctgcctctgatgtcatactctcagcacctaatattttctacaaacatttattgaaactttattttgtataagtctctgtccagtttgaatatttaaaaaattcataatcatatgaaacattaataataaatacaaaatgagagatgccgatactgaaaagtaggattgcggagtggtagaaaatatttctggctgtagtagatggggaagtgttcaaagaggagtataattcaggtttccatttgccatcgacttatcacatggctaactcactaagcgacttaattaaaattaaattaatttatcatcatctgatcaccatttcacacaactcatgtctgttgctgtattggctaaatgatggcaagacaaacgacctctgaaaatgatcctattgaccttcggaatctggatttttttttcaatgcaggtgtccatagaagcaatctgatgtaatccaacatgagttcaagcacagtcatttaatatcccctatcaagtacagtcatttaatatcccctatcatcacatgtccttcatacataaaaatcattacatgtgaaagggtggagagtgtgtggatcccttattattgtgttattgtaacacaataacaatattgtgttattattgttaacacaagtgagtcatatgtcttgctctttggactgagtggaaacttgtattctttctctgcctcaggtcaattaacttcattgaggtgagttgcattccttctttaagcatgttgaaccttcaatctggactcagatgggctaaatagaggagctaggaaaaatacagaaaataaattattagagagatcagagaaagatacataagatttacaataaaagaattatgagaaaaacatccaaaagaattaaaaaccataggagaaggaaaaataggtgaacagctttttaatttctataaatgtgttgttaatactcataataaaggactcagagctgggatatgagaataataggtcaaacgtatatggatacatagatgtgactacatacatgagttgcaaagaatgctaaggagggcaaaaagagattgagaagagggcattattactaatatatagcaatgttgaatgtttagggtgtttcaggcactgtacaaatcttttaaatacacaaatcacttaatcttgccataacattagaagatactatctactctttaccaaaaaggtaactgtgggatagcagagttaagtaacccgttcaaacctatgcataataatcagcagagatggtccttatctaagtttttctgcctttgaagtccaaatagtttaatgcagccaggtactaaagaagaaaacttttgtaaattagtttagtttaatgatttacatgtggaaaagcacagagtgaaaagcacatatcatctgagaagcccagtgagtttggctgaaatggagtgaacatgtacatgttgagggtgaggaagatgattagagagaagtgatgtgttgtggttcttaaaagctaagaggaaactgttagatatgatatagtctgtggcagggagccattgcaggttttccaagatggactcataaggagaaaacacttcgtgggactggaaaaggcagtgaagtggtgtgtcctatgataatgtactacagtgtaggatagtggttaagagtacagttatgagagagggactactggttagcaccttacctgctgtgtgactgggcaaataatgcaaacctcagtgtcttttattgtaatatgggagtaacaaaaatagtaactacttcataggattcttgtaaagattaaatgacttaatttctttgaagtgcttggcagttcctgataaatgaccagtagttaataaatgttagttgttattattatcattatatattattactcccatagatacatatagaacagactgcagcagagaggcaaatctttaatgttgtcagagtatagacaagttggtgaaatggctacatgagagcggaggacaagaaggtgcagattgtggcagtcacttcaaatggaaatatcaccgcttgaatgaaggtatatgagtgtcaacttgcaaggggaccaggtaggtttcatcagaaattaaggaagcttaaggagaacagccaagttcagcttgacagaagtggtggtggcacaaatgcaagactggtgtctttcaagaaaccaaggactgttgaaagtagcaagagctagtttgttttaggtccatcatgttttatattcacactttcatgtcagtggagcaaagaaatggaatacaatataatagaatggtagaatcttatttttaaaatctgtgttattctgatctttaacttacttatatctttgatagagatctttacctgatgctcaagattgtagaaatagtataatcaacataacagtatagcactgtatttatatcctgcactgtttagggagggtttaaggccattcaaaaggatacataaaatacaacaagattacataaatgaaaggtgagataaagcaacaaagcaaaacaaaagtgaaaacagagatcataggcacaaataagattaaaaacgcatgtaatgaagatgaaagcttttacatttaccccagatggaccacagggttgttgttaagcctttaaacagtgaacaatgctgtacacttgcatatgcaattagaacatgtggaaaaaatagtggcctgttagaagcctaattaacaatttgtgaaaaaaaaaaaaaaaaaaaaaaaaagaggccgagctgtagctcacgcctgtaatccctgcactttgggaggccgaggcgggcggatcacgaggtcaggagatcaagaccatcctggctaacacagtgaaacccagtctctacgaaaaatacaaaaaattagccgggcgtggtggcgggagcctgtagtcccagctacctgggaggctgaggcaggagaatggtgtgaacccgggaggcggagcttgcagtgagccgagatcctgccactgcactccagcctgggcgacaaagcaagactccgtctcaaaaaagaaaaaagaaagaaaaacaaaagaaaacttcattgtattgtaaggccaagaacaaaatatatcaagataaggaaaatttgtagtcaagaatagaaaaaaattatggctttgaagtatgagttatttaaagaaagtggaaacatcctcagactatgcagtaaaaaacaaagtgattttcttcttctaaacttatgcaataaactgataggtaatatgtgaaagtcatagaatgtagactagaggatacaacaaacctatttcctctatgttcataagaagtaagaaaagctctgatgtgagttagcattgctttacaattttgaattgtgcagattgcacgtacttttcctcagtttgaagtaaatagtggacaggaaaaaatattaaatgttggcagtaaatatggaaggaaattacaactaatgtaatatgctaaaacatgctatgtttattttactaatttgaattaaaatgtaagaatttaaaatgccctggaaaaacacgggcattgatctgacgtctgaagttttaaaatattacacactttgaaatagcatttgtaccttgaaatacctgtctctatatattttttaaaacttcctttttctttcattccatttatcatcaaataaaggatgaacagatgtaactcagaaactgtcaagcatgctgaagaaagaccactgcagaaaaatttctcctagccttttcaaaggtgttaggaagcagaaaggtgatacagaattggagaggtcggagtttttgtattaactgtattaaatgcgaatcccgagaaaatttcccttaactacgtcctgtagttatatggatatgaagacttatgtgaactttgaaagacgtgtctacataagttgaaatgtccccaatgattcagctgatgcgcgtttctctacttgccctttctagagaggtgcaacggaagccagaacattcctcctggaaattcaacctgtttcgcagtttctcgaggaatcagcattcagtcaatccgggccgggagcagtcatctgtggtgaggctgattggctgggcaggaacagcgccggggcgtgggctgagcacagccgcttcgctctctttgccacaggaagcctgagctcattcgagtagcggctcttccaagctcaaagaagcagaggccgctgttcgtttcctttaggtctttccactaaagtcggagtatcttcttccaaaatttcacgtcttggtggccgttccaaggagcgcgaggtaggggcacgcaaagctgggagctactatgggacagttcccaagtgtcaggctttcagatttcctgaacttggtcttcacgggagaagggcttcttgaggcgtggatagtgtgaagtcctctggcaagtccatggggaccaagtggggttagatctagactcaggagctcctggagcagcgcccaaaccgtagtggcactggaccatgttgcccggagcgcgcacagcccgcgcggtgcggggacctgctctctgagcccgcgggcggtgggtgggaggaagcatcgtccgcggcgactggaaccgggagggagaatcgcactggcggcgggcaaagtccagaacgcgctgccagacccccaactctgccttcgtggagatgctggagaccccgcgcacaggaaagcccctgcagtgcccatcgcggccagagcagctggggcatcaacggcgggcgctccctcttactgctctctggcttcgacgggggactagaggttagtctcacctccagcgcgcctgaggctcatgcatttggctaatgagctgcggtttctcttcaggtcggaatggatcttgaaggggaccgcaatggaggagcaaagaagaagaacttttttaaactgaacaataaaaggtaactagcttgtttcattttcatagtttacatagttgcgagatttgagtaatttatttctagcctccagctctgaaataaatgacatgttgttgtttttaattatttttaagaaacgcaagctagcctttggaatcaatatccctgcttagagcagaagtttgttggctgagtggagcacagcatatgcattttccctgtcttttttgttctttcttttaatgatacataatattttacatatttatgaaatggggtacatggaagcgttttttacatgcccggaatgtgtaatgatcaagtccgggtatttgaaggatacatcaccttaggtatatttcatttctatgtgttgataacattttaagtcttctagctactttgaaatatacaatatattgctaactgtagtcaccctcgtctgctatcgaacattggaacttatttgtcctatccaaccgttcttagtcattcaccaacctcttttcatttcacctttttacccttcccggcctctttcccttagtcttggtgtgcctctttctcagctttcctgccccagacaggcggatgctcatatgtgtttctgtcttatgaacttctgcttttcaagtggtgttggtcgcccacacgtgagccatatgctgctggtgatctgctctgtggtccaggctcttgcttccggtaaatggctatgtaaacatcgcgtttgtggcctggctgatgagacagaaggtcaaaagtacatttaggttgttaactggcaataaatatctgtatataatattggtaatgtaatcatatagggaaaataattatttaaagtaaattttgatcatggtgctctgcctttatagaatatttaaaacttcactaaatagattcattgttagtagtaaattgtaaaatagactagtaagtttaataatattagaaactgtaatgtaaattataagataaattagtaaacacattaatattataagaaaccaagcttttcagtgtaagagaaaaaatacaaatgtggaaatcaaatacatttttaaaaataatgttaagtttgaattagaaatttcaatatgaattcataatcttttaatagttcattttcagtccactgaaagggacagtaacaatgagcactgttagtaccagatctgggtttctaaataccattcctccctaaaagaaatgaacccctcagtagctaatttcagccaggtctgggacaggaaaaatagaaagtgagcctggagtatcttgtggtacctgaaaataaggaagtggagtttaatggagtagtcgaaagcacactgaagctgtctggaagatgcttccaatggccaactctgggacaatttgagcatcaaagaacatcgtaactgtaactgattttgagatactgaatgctactgctgaatgcttaatattctgagagaagggaaactgaaagaaagtgtgagaggtagagaaaataaagcaatgatctttagagaaaaattccagctatcattttggaacttccattgttataatagattcaggcaaggattgtcaatgaactctaaactatcagaaaaatgttgtatctaagaattttcttcagaatgtttactaattggaaggagaatatgcttctccaattaaagattttgcagttagcaccttaaccgagtgatcagacctggtatctctcacggtagaatggactgtagtaaatgactcatcacttggattttgagtaaacaacatcacctagcaaatattaatatatctgcaaaaacatttagtctgtatacaattaaacttgtagactggggctgtccaatggatatatcatgtgagccacatttgtaatttaaaattttctagtagcaacagtaaaaaatgaaaataaaaagataaagtaattttgtaaatatattttatagaactcaatatgtccaaaagattggattttctacatgtaatcaaaatgattaataagatagtttacattctcttttatgctaaatctcctgtttgatgtgtattttacatttattgcacctcccatttgtattcagtttgatacaggtatacccaagatgtgggacattctgtaagacagctgttcttgttcctttacaaaagtcaatgttaaaaaaataaaaggaggacttctagattaatagagactaaagagatataactaccaaacgtagtgtgtgaacattacaaaacaaaacaaaaacaatctaaaagttcaacaaggaaaaaatcctatggaaaacattcttgggagatttgaatgtgcattagatattagccaatatcagaattgtaatcacttttcttagatgtgataatggtaggagaacatgtaattgcaattgaaaatttttgtaacaaaaatgttcatataaaccatgaaaaagactccatagagtggagggtaggtattccactttttgtttttaactttgtatttttgaaaacttgatagcttaaagaattatgtacttatgatacaaacatttaggtagatttaactaagaaatattgagggtatgtgaagagaaacagtaaagaaaattgtatgatctttcacatatttctattattggttctatcatggcctatagactttttttttcaaattagagattatattttaaagtagttcttattaaattgtgttcattgccattgatttaaatctattttaacatgggattgtaaagaagcatatggctttggtaatagataatgctgggataatagtcctatttggaatatgactattagcaaagattctttattaaaatgatgtttgatgaatgacttgtctttctaagcactgttttttgtgctaatggggataagtaagttatctagtaggggtgagagtttgtgtgaaagtgcattttaatgtgatgcgatgcagtatctcagaaatctgaggttgcaccttatagtttggtggtcagggaacagacttggcatttaaatattggcttagttatagctgtgaaccttggacaagttaactcttctcactcttctacgtctctaaaagaacaaaaatgtgtcttcctcatagaattgtttatgaattgtgtgtgggaagtgcttacttagccagtgcctggaacattataacttctccagagtagcagctgttttagagaacaaaaaaataaataaaaggcttagagctaaaactcaactatttatggctatttttctcctttcatcctggttccagggatactgaaaccatgcctttactgggaattgggtgggaccaaacctgaagagttgtgtttgtgtattttatgtctgtctaacattactccaaagccaaatgggtaaactctggatttttttctttagaagtctcctcacctcttttgacctcacttagtgtaaagaacaaagacaaagatgaatttaccttatgaacttaaaaaccgtgtaaaaaataacacaaatcttttctaaaatagtttttcttttatacctacaaaaatacagatgaggcagatttgttacggttggtttgctttcacatcctaggtagcagttacacagagtagaaaatgggctacagagttagattcatttgtatctgggctcaaaataatagttgaccttatgcctgaggagaactttttgacaatttatagaacatcatttctgaccatagctttctagcgtgcatttatttcataatggtccatttaggactccagacatttttttcacaattagatttgcttataaggagtaatttaattttcttctgaggctagttatgcccagcatctaattgccacttctcttcactagaaagggaaggattaagaataatatctgggtagtggatggataaaatgtctactgccatcattaatcaaatgacaattaaggggattcataattaaggggaagcatgaatgattttctaattagaataaaaacagggaactcttttcagtatgtatatttttctaattgcaaagggtgtatgtatgtattcatcatagcaaatcaggaaatatcaaaggcacaaggaagaaaatatttttagagagattccagcactcagtgataaccacgtatgtagatttctaagatatatgtaaacatatttaaacattataaatggggtcatactattatcatcctgttttttaactgtataatatagacatatttcttcttcctattagtcattaaatatacattctatgttaatttgggtaatttaaaaaatatgtactttttaaagttttatgtaattccattgctgttttgcagtgaaaaagataagaaggaaaagaaaccaactgtcagtgtattttcaatggtgagttttgaatttattaactattcaaaatacttcggaaatttgacatctccttacatggaaaagagatatttcatctgatgtaagattttcgtatagggtatgttaatggagatgcaaaataaattggtttgatttagcttattttcaggagaatgctgatcataacttgctatctatattactaatctacagccaccattcctgacttagatttcaattcttctaatgaattatgttgccagtgatccattacctacacaagcacctctcccatctgcatagaggaaaccaatcacatagaatgctgtctttaatggctctgaaatttggcaggttttttaggtcaaagtcagttgctatcaataaaagttagcaatggattatttattactatgcaaattttaggtcatttaggttagtccattgcaaattttagttcaaaatccattactaacaataaaaggtagcaatggattatttattactatgatttcaaatatgtcatatgccattattcccctgtgttaaacagatgaaaatctagaattcgaaaaccttattgtaactctttatttcattttctggttgcacagtggtttttttagaagcttttctttaatcacacttggaatcagacatgtatcatatatgtgtggttggttgatgacctcagtgctgtgatcttggctcactgcaacctctgcctagttaatgacctcttatttacctggattcttacttccttttttctaagagtacaaatttaggtgaactgttaggtgaaagattccagagattagaacctggaagactactaaaccaattaagtccaacagcacatgctttataattcagtcataacacagcaatttttttaaggtaagggagtggatagattgtcttgcaaaatggattttaataaattgactataaaaatagttgtaggtagggaaaaaacagtcatgtgacttttacactgaggactctatggttcccttatgtgatcttcgtttctctgtgctaccattgctcttgccatgactcctgcttttattctatctctacgccctttggaattttggtgagatgagactatgtacttgagtcattcttaggctacttgagtaaccaagtgacagttttcattgttactttcttgtatggaaagaagcgtttaggttaaagttgtatttatccccaggatttcagtgctgtcactttgagactttcagtttttattatttgtagttaaatttttttaaaccttaggagtcttatattttagaaaatttaacagacctactatatagaggcaatgttatcaataattcattttaaggcacaaaagaataaaaatatggagctttaatatgaggtagtagtaatagcacacataaagcactgtgtgccaagcattgtcctaagtatttcatatttaatctcatttaatccttacaactccttttgagaaagatactattattattccagttttacacatgaagaaactggagccagacatgttcacttgtctgaggatgtacaatggggccaggatagagagaatatattctaagtctcttgatgaagtactctactacttagatagattttcctcacatctttttcctgaaaagtcaacatagaaaacattgaatgtaacttcaatataaaacttataaacacaagaacataataaaagtttaacaatatattggtgatgtcactggcattgcttattaataatagttttcagtgaagacaaaaaacattgtgtgttcagggtttccaagaagcccagcttcagtgattcagactaggaggacccagaggatttatggctaatgtttattacaacaaaaggatacaaggcaaaatcagccatggcaaaaggcgagtggggagaagtccagaagaaaccaggtgcaagctcctagagttctctcctaatggagtcacagggcacactgaatttccccaagcaatgagttaagacagcacttgtagaatgctgtttatcagagaagctcattagagactcagtgcccaaggattttattaggaactgatcatgtaggcacctacccagcatgcaccaaaatttcagactcatagaaggaaggcagaactgcagaatgaagaatcatattgtttgtacagatagtttggccatacttatcagttagaatggtggtaatcctccccaaatccaagttccagccaagggccaacctttgtatacaggcctttctaaacatggcagcctcagagctgctgtgttagctcttgtctgcacacaatgtctgttaatttatttccactatgagattttttagcaatcttaaaaaagtgatgaaagaagtaaggaatagattcaaaattctatactagccttttaaatttatatcagaccttgtttcaacatttacagaaacacaaaagtagaataaaatctaaagcaagtgaggaaatgtgacacatagagctgggctgtaatttctacacaaaatgaacttcttagagattatacactcttggtcaggtgctgtggctcacgcctgtaatcccagaactttggaaggctaaggtgggcagatcactagagccctgaagttcaagaccagcctgggcaacatgacaaaaccctgtctatgtgaaaagtacaaaaattagctgggcatggtggcacatgcctgtagtctcagctactcgggaggctgaggtgggaggatcacttgaacccaggaggtggagatgcagtgagccaagattgtgctactgcactctagcctgggtgacagagtgagacactgtctcaaaaaaaaaaaaaaaaagattatatattcttgcaagaattgtgcactgtagattgaactctgagctttctattatgtgtgtcttagggaaacattaatttttttctaaatagataatacctaacaatgttaagtgtttcccttgtaccaggcatttgttaaataccctatgtttattgtgtgacataatcttcatatagggacataagtacctgcaatttaggaacttgtgttattcttgtgttccagatgaagaacttgacttagagaagttaagtaatgcattcaaaatcacagggtcacatagctactaagcagggtagactcagatatgcccagttgcttttaacaactgtaatcatttatgactggttaaactgttatctctctggaattgaagagttctttattgctgctatcttttgatcttatgaccatctcatcatcaaagactacgccacctggctcagtatcctccctttccactttggtgctccaaccaacttgggtgacttttatggttatatggataatcactccttgagcttcacagctgcaataatcataaaaacctacctgtgtctgaatctgtttcctcctccttctttccagttatgacagagttttagtcttaagactaatcattcatactttggctcctatctcctctgccttctcagggaccttacatcattattaccactcattctcttctgtatcttccatctttccctctcaactggatctgtcccattggcattgacacatcaaggcactgatgcccttcatggagccacccctgccagctcccttcacacacaaaagtggcctttgcgttctgtcttgatttcgccattgacttagttctcaacctattgaagtttggctcctgttcctgtctctctctacattcagtggacattttaaaattctatcttgatctctcagcagcacttagactttctcctatattttttgtatttgcttctgttatgtcacggtttgctgattttcctccagctctttggctttttcttgtgctgccctcgcctgtaaagttaagttcctcaaccccttatcacaggagtcagagatgatgtggacattcctatagttccacaaagccattttcaaattttttttattctcatgcaaactcctttgtcatttgagtttcattctgcataattatactatcttctatctattttcggtggtatcctcgaagtatacccccacccccattccttgaggactttggcatttgattgcttctacttcattcaccttatgttcctgttattcttctgagtattttggtgaccttacaaataagtctcaacattctctgactgcttcagttccaacaacgacgctccataaattacatgagtaccttagtaaattgcacgtgtggacaggatcttgggcttattgtctgggtgagctttcctctatgaaggtataaacacacacacacgtgtatcagtctttgaccacaacctgtgattccttccagctctgccctgcctctttatcatccctcttttgacattgtgtattcatttcctattgctgctgtaggaaaatagcactcacttagtggcttaaaacaacacaagtttattaccttactgttctggaatcgaagttttactgggctaaagtcaaggtatcagcaggattgcatttcttctggaggctctgtttccttccctttttcagcttctagaggacacttgcatttctagactcacaggcccttccttgcatcactccaacctcttacttcaatcatcacatctcctactgactccaggccccctcctccctcttataagcacccttgtaattacatttgctctcctagataatccagggtaatcccctatctggagatcttttaaatctgcaaagtcccttttatcatgtaaagaaatatattcacaggttcctgggattaggatttggacaggctgtggggggagaattattctgtctaccacacctggtcaagactttactctctcaactgctctttcatctcctagtatccctccttcctttttgctcttctaaaaatttacccatagcagccacatcatatcaccttggtccctaccttaaaaccattaaatgctttcctttctgcttacacaggaagttcagtgtaaaacccagactccttcctgtcatcacaaaatgccctacatatctgacctctgttatttctgactttactgcagacaaatattccctctcactctgctcttgccacagtgttcattctctttggtccttgggatacagcaagctggtttttacctaagtacctttgcattggctcttcctgcctggaatgcactgtccccagatcatcacaggatgaactgtatccttcctgtcactgaagtctcatcatggatgttacctcctgagaaagacattctctgaccagccaatctaaaccaggtgaccctgcctgtctctgtgtcataccatgtatggcttttctcctgaatatttatcactgtctgatttcttttttatgtgtttgtcttctctctgaaggtaggctccgtggaggcaggagattttttgtatattttgttctctactataacccaaatgccctagaatggtgcctggaactttcatagcaacttaaatattgaatgaatgttgaatacatctattcccccttttagtgtatgcactagagtgtatgctttgtgaggataggtagcttttcttactcactgttgttaccagtacctagaaccaagcctgaccttattaggttctttcaaatatttgaaagatattttaaaatattcacatatcccttgaatgttaaatgaataaatgaatgaattaattctctctcaaatccaagtcatgtttgccatctaatctggtgaatgttacctaaacctctctcctgtcagtaccttctacttctttgccctgggaagcccagtctttggcattaggcacggatcaacatgccttttatgtggttctggttcaccttctctctctttcctttcagcatctaatcaaactttctttctttctctctctctctctctctctccctccctctctccctctctctctctctctctctctctctctctcctctctctctctctctttctttttttaggtcttaactctgtcacccaggctggagtacagtggcatgatcacagctcactgcaggttcaaccacccaggcttaagtgatcctaccaccccagcctctggagtagctaggaccccaggcacatgccatcacacccaaacaatttttaaatttttttgtagagagagggtctcctatgttgcccaggctgtaccaaactcctgggctcaagtgatcctcctgccctcagcctcccaaagtgttgggattacaggtgtgagccatcatgcccagcgcatttccttttttaaaagctcctattacaattagtttatacttctattttacatttcacctgtgttacaacgttttttggtctgcctgctttttgactttatgagagtgaaaagtcttgttaattattatattttcaaaaccagtaacattatctgcttatatcatatatttgcatattgtatgctcaataagtttcttgtattctcatttttaccctcataacagctatgtaaggttttctgtgtgtatgaatattttcctcattttgtaaattcagaaactgagactcaaggttattaagatttttttcccctaaagtctccttcctaataaactacagagtgagggcatttgactgaggcttttgtcctactcagcattatgttaccactttcttcaaatcttctcacccccttctctctagaaatcaatcttgcttcatgtcattaagaaatatgaggttctagcatttataaggaacctaaacaaatttacaaagaaaaaacaaacaacccaataaaaagatgggcaaaggacatgaatagagacttcttaaaagacatgtggccaacaattatataaaaaaagctcaacatcactgatcattagagaaatgcaaatcaaaaccactgtgagaaaccatttaacaccagtcagaatggctattattacaaagtaaaaaaataacagatgctggcaagattgtggagaaaaaggaacatttatacactgttcagccattgtggaagacagtgtggtgattcctcaaagacctaaagacagaaataccatttgacctattactgggtgtatacccaaaggaatataaatcattgtattataaagacacatgcattgtatgttcattgcagcactattcacaatagcaaagacatggaatcaacctaaatggccatcaattgtagactggataaagaaaatgtggtacacatagagcattgaacaccatgcagccataaaaagaaacgagatcacgtcctttgcagggcatggctggagctggaggccattatccttagcaaactaatacaggaacagaaaaccaaacaccacatgttctcacttaaaagtgggagctaaatgatgagaacacatggacacctagaggggaacaacacacattggggcctttcggagggtggagtgtgggaggagggagaggatcaggaaaaataactaacgagtactaggcttaatagctgggtgatgaaataatctgtacaacaaccccccatgaaacaagtttacgtatgtaacaaacctgcatttgtacccatgaacttaaaagttaaaataaacaaataaaaaataataaaaaaaaaaacaaaaggaaatatgaggttctgaactctttcaattttctgtctttattcctggaaaattagtactcactttaatctccttccttctagtctaagattaagagatgtaattccaattttcccagctcagtgaggggtgtcttttgatcagtcagctatttctgtttccacactttacaccccaaacttgagggtccccagtcttttttaagcacattgtgctcttttctgtctcagtttacttttctttttggcttaaatgccttttttttttttttttttttgagacagagtctcactctgtcgcccaggctggagtgcagtggtgcgatctcggctcactgcaagctccgcctcccaggttcacaccattctcctgcctcagcctcctgagtagctgggattacaggcgcctgccaccacatccggctaatttctttttttgtattttaatagagacggggtttcactgtgttagccaggatggtattgatctcctgacctcgtgatctgcccgccttggcctcccaaagtgctgggattacaggtgtgagccactgcacccagctacacttggtaaactttcaaagctggaaggaagcatcacctcttttatcatatgaagccttttcacaaaggagggaatgatgattgactcagttttgtgtctattctatacactgtactgtcaaagcatgcagagcatgtattgcatatacatttttctttaacctctctgaaggcagggttatatctttggcatttatctctggattttatctgtcattgaataggcattcagtaaatgtctactttcatgatccacttatttttattatggccagtgacagttctggaggtaaaatgtcctgtgttggtggtgatgggagaaattttttcatatcaactatcttctcttcctgtactaaggagtttgatattttatctactttaatataatctctaaaagaagacctcttccctttcatttttgtttaaggaagcagatgaattcttatctaagacaaagtacatagtgcaaaatttagccagtgtttcaatgaaatatgaaaaaatatgccaaaacgtgttgtcccattaatgttttaatctgtaaatatgatgatgtttttagatcatcaacccataaataacatggaaagttatgccatgaacccaaacttaagctcatttgataacacatttaagagctagaaaaagggtaaatgcaaatacttaagtatctattagatactcttttttacacaccatatcttaattttcattaattatttcataatttggctttactttttatctcctgctttatggactgccattcattactggtaataaccattctttatttctccactcggcagtccagtaccaaatcccccagttgctactgtaagattcatgtaagctaactctaggattggtttctatccccttgtgaagtatatgtaagttctaaaatcttgctgtctgtggctatgtcttttttgctgcctaatctttgttttggtttatatttcctgcctaggcctatgatttttttacccagtttcctccctgcattacaaacctgttgcctacagctacaccttgcatccacatgttaaccttctgccctgggatttatccatagacacccacagctggctttaccccatttctgttttttttccctttggttttctttcaatccttagctagttccttgagttatagggaagcagtattaatcacttcccaagggggccctgagcccattcctcttaactgtgtccttttcctgtaactttttgggttcagagaagcttttctttccttcctgttacctgcctacatttaaagagattatgcagatctccaacgtgggtcattcattattgccatattctgtcttctcagaaaaaatgttccttgacaagcatgcatcagactcattcctttcttttttctgctcattcttgaggcctaattatcttcaaatcattttacctttataccagttccattgtttggcaggtctttaacccaaaccactttcttaaagcaacacaatgtttcctccatggtatcctcagaggggcctttggcattcaagtttttgcccatgagatgataagtggcttctattcttagaaactagagcaacaaataccatattatataccattaaatacttttacagtttcccagaatgtcccatccttctcattagacttcatataagaagacagaccaagtccaatatgaagaattaggccagaactcaatggaagaatcaaatgtccatttctaattagactattgcaataatttagcaaaggtagagggtgtcttggactaggttggtatcagtagtagtctgaaaaatgtttggattttggatatattttgaaggaaaagcaaatcttccatgaaactgtactaatttttcctctgctattcttttttctctctttttagtttcgctattcaaattggcttgacaagttgtatatggtggtgggaactttggctgccatcatccatggggctggacttcctctcatgatgctggtgtttggagaaatgacagatatctttgcaaatgcaggaaatttagaagatctgatgtcaaacatcactaatagaagtaagtattgtttgtgtaccaattttattggaaacttgcagcaaaaacaagcacttagagtgatgtttatggattctttactaaatacacattagtgtgtttagtcctgtaggaggcagacagtctgagttataattcatatttgtagtgagttagaaaagataatatttacaagcattacaacacacaactgaagtgccagcagagatatgtagaaaaagagagagccctgtgaagtcagaaatattctggaaagcttcaagaagaaatataggaacttaattagaaccttgaatgataagtaggaatctgttgtgagatttcctaacagattgaacatgggtgtaagacgaaaagtcggggatgattctaaagtttttagccctagaaactgggaggatgcagttactatcaacagaaatgagagatggagaaggagagtggatttgagcaataaatcccagaaatttagttttggacattgttatatgttgggctttctggaagtagatgcaggaatggaaaagtggggcaaaattgtgtgtgtgtgtgtgggggggtattttaggataggataaataatagcttgtagcttgttttgtgtgttaatggaaatgatccaaaagaaaggagaaagtgatgtttgaatgaaagatggaagagatttgctgagtgatatccttgagaaaaaatggaatccagtgctgaggaggaaaacagtaacaggtgggaaaagtgaatttgagtgtcagtacccagtggtgggtagatgagaaggtgagaatctgtggaatttttctcctgataactttagttttctcagtgaagtaggaagcaggagaattggctgatagagacagagaaaacagatgtaacacagctctcaaggaaagtgggaaagtgaatagactacagaaataatctgggtgtaacatacatattctttcctctctctccctctctctctctctttctcgattggggaggaatgggttgatatctctgagtttcctaggttacctctggtcaagcctagattgatttaaactgagctactcaaaaacttacaatccagtttgcactcaggtggtcaaatgttgaaaatgcctgtttgataacgtacttgaaaatgtagtgataccacttagcttacaaggacctttcaacttttgaactttcaagtttctgatgaatgcaatgaattgcttccccagaaacatgcacatgaatattcataccaatctcgggtatatacggatcttttgatacttgtcagtgggtcctcagaaccacttcatgaccctaaaaagtacattgtttaccctggggtagaactacttcaattctgtggatgcaggtaatgagctgggccagaaaaatttttgtatgtttgagctatgtaaaattcttatgctttattacatcctttcacggcatccaaagggacctgcagaaagatgctgcaccacctctgaactggtacctttcttttacaccattcaccagaggaagtcctcaatgctttctgaattcattagttcctatacttgctatattggccaatattctgtggcgttagctctcttactgcttcatagtggaagaatcaaatacttcatcactctctggtggctcagcaggcctaatgggtacatctctgtccatccagatcttgctcactttttaatgacttcccagccttcagaactgtgggaaataaatttttattgtttgtatgttaatacatacagtttatgtattttgttatatcatcccaaatggactaagacacacagtaaactcacttacttaatagcatgcatgagctcccaaacagatgatgatctagttgtgaagactagctcctttctggataggcccatgtgtctgtatgcctatcaaaatctcctaggttaaacaggggccacatcaccacagcttgccagctggtaatttagatttccatcttcatagatatctagtttctaggtgaggttgtaattcacattgcagtccttgccagtcattctcattcagctcactcttctagtcttgagaacgggaaagagaaagcttagagaaatatttgaaagtttacttttgttattctcttaagaggtggtatatttagtggttagcgaacatactctggagttggactgcctggctcaaaaaccacacccttaccaatttttaattttgaggtttagggaatttattcatactttagttattaagttggataacaatagaacctacttctcaggatggttgtgatatttaagtggattcattcattgaagaatcacagaacaaagtctagtcataagaagtactcaacaaatattagttactgttattatcaacaggctttcatgttcctcacaaatgaaattacataactttcaatgatgatatggttccttatataatttcttctttacaaaattctgtgatactacctcaattttcatagttgttgaaagtttgggacatacccaaagttactcagtacctattatatgatgtgaataatcatccctttaagtagaatttccttggttaccagccatgcctttcagggaaggtaggtatcctccaactatgacccctgggctaatttggcctgctgcctctttttgtacagggtgtgaactaagaatggattttacattttgaaatcattgaaaaaaaatcaaaagaagaaattatattttgtgacccgtggaaattatgtgaaatttaaatttcagtacctgtaaataaagtttaatgaaatgtagctacacctattcatttacattttatgaatgtaagcagcctatggctgcttctatgccacaatgacacagtagagtagttgtacaaaccgtatggtctgcagagcctaagatatttactatctggccctttatagaaaaaggttgccaatctctgaagtagggtattgagtgaggggttgttatcttcagtcaatccatcaattaatttgtattagagcattctgtgtgccagtcacagtacatgccctcatcattcccaactcttgaggagcttagtgtagtgggagggatggacaagggtgaaccaataaatacagtcgaatttgattagtgatataatacagagataaataaaatgcattggaaaaagagagaaaggacacctgactccatatagaggaatcatgggaggcttccaagaggaggtgataaccaaatatggtcagcatctatctcctacacaaagtgtacctattctgtgtaacagatgaaaccatttcaaaataaagattaaataagtaagattaatatccttccctcactgccactccttatttccactcccctcaccattgtctatccttccatgcctttccaaagacagcatgctatctttactgtgattttcactttaggacgcttactacactatcactaatctgcttgtctgcagattcagactgccagataccctcaagtctgcctggaaagcagggaatagcatcaaaggttttgatgcttgtcccagagatgagggcaaacatgctctgtcatgcctgtggagggagaaccagcctactaaattcttggggcccgagatacagtcagatcattcttctttttgcccttccctaggcagaacctcattatctctccatgggggtggactagataccagagcctccttattggaaaagtagtccttgcttaaggggacttggacttgcggaggctcttgaaagcctgggggtttttacaataaacataggatctaattagacagctctaaaaccttcttcagtaagcagatccttctctgttgctgcaatagaacccttgtaagttttctcgtcccaatactttgccttaattaacagacatcagcttttgttctgctgttttactgtggaccagatttcctgacagccactcccatctatctctggtttaattatagaatatgtgtagcctttgccttaaaatctctgatgactggagcctagggaactctctgattctgtcatatcacttttttttttgtaaacaaagcttaatcactgatgaatttctgtaatattctgtgaattctcatcttccttatgagactggccactatctggaaatgatcctagataaaggcgattgtggttttaaatgtgttgtggtgaagacggcaggtggggtgcctgtaaaatgacatccaggcagttgaagaaatgacactaaatcttggcataaagaacaggactagaagctgggtgtggtggtgtgtgcctgcagtcccagctattggagaggctgaggtgggaggatcacttgaggtcagaagttcaaggctagcctgggcaagatagtgagagtttgtctctaataaaacttaaaaggttaaaaaatgataaaatgtaaggaggaggtggaacaagatagccaaacaaaagcctccagaaatcatccccccctcccccatccctacaggaacaccaaattgaacaactattcacaaaacaaagcaccttcataagaactaaaaaccaggtgagcgaccacactatttggttttaacattatattaaggaaagaggcactgaagaaggtaggaaagagagtcttgaattgcctgcaccactcttcccctcccccaccagcagcacatactgaagaatgaatcacagtctcttaatagcaaaattgatcaagcagaaggaagaattagtgagcttgaagacaggctatttgaaatacacacactcagaggagacaaaagaaaaaagaatgaagcatgcccacaagacctacaaaatagccttaaaagggtaaatccaagagttattggccttaaataggaggtagacagagagattagagtagaaagtttatttaaaagggtaataacacagaatttcccaagcctaaagaaagatatcagtattcaagtacgagaatgttgtgggacaccaagcatatttaactcaaataagactacctcaagatatttaacaatcaaattcccaaaagtcaaggataaagaaaggatcctaaaaggagcaagagaaaaggaacaaataacatacaaaggagctccaacatgtctggaagcagacttctcagtggaaactttacaggtctgaagagagtagcgtgacatatttaaagtgctgaaagaaaaacactttttatcctaaaatagaatatccaatgaaaatatccttcaaacatgaaggagaaataaatactttctcagatgaacaaaagctgagggatttattcaacaccagacctgtctagacaagaaatgctaaagggagttctttaatcagaaagaaaatgatgttaatgaacaataagaaatcatctgaaggtacaaaactcactggtaataataagtactcagaaaaacacagaatattacaacactgtaattgtggtgtataacttactcatatcttgagtagaaaggctaaaaaatgaacctataaaaaataataactacaataactgttcaagacacagtctaataagatataaacagatacagatataaaaagtagggagctgaagttaaagtgtagagtttgtattagttttccctttgcttgtttgtgtatgtaatcagcattaagttgccatcagtttaaaaatgagttatatgatatcatttgcacacctgatggtaacctcaaataaaataacatacagcagatacataaaaaattaaaagcaagacattaaaacataccaccagagaagatcaccttcactaaaaggaagacaagaaagaacgaaagaaggaagagaagatcacaaaaaacaacaaacaaaatggcaggagtaagtcttcacttatcaataataacattgaatctaaatggactaaattctctaatcaaaagacatagagtggctgaatggattaaaaaaaacacattaaaatattatttaagaccaaatggggtttatcccagggatgcaaggattgttcatcgtatgcaaactaatcaatgtgatatgtcatatcaacagaatgaaggatataaaatatatgataatttcagttgatgatgaaaaggcctttgataaaattcaccacccttcatgataaaaactgggtatagaaggaacattcataaacaaaataaaagccacataaacagacccacagctagtatcacaccaaatgaggaaaaactgaaagcctttccttcaagatctggaacaagacaaggatgctcactttcactagttattcagcataatactgaaagtcctagcgagggcaatcagacaagagaaagaaaaaaaaaggcatctgaattggaaaggaagaagtcaaattatccctgttggcagatgatacaatcttatatttggaaaaacctaaagactccaacaaataactattaggagtgataaatgaattcagttaagttgcaagatacaaaatcaacatacaacaatcagtagcatttctacatggtgacagcaaacaatctgaaaaggtaatcaagaaagtaatctcggccgggcgcggtggctcacgcctgtaatcccagcactttgggaggccgaggcaggtggatcacgaggtcaggagatcgagactatcccggctaaaacggtgaaaccctgtctctactaaaaatacaaaaaattagccgggcgtggtggcgggcgcctgtagtcccagctacttgggaggctgaggcaggagaatggcgtgaacccgggaggcggagcttgcagtgagccgagatcccgccactgcactccagcctgggcgacagagcgagactccgtctcaaaaaaaaaaaaaaaaaaagaaagtagtctcatttactattgctacacatgaaataaatacctaggaataacttttactcaataaatgagagatctctacaatgaaaactgtagaacattgatgtaaaaaattgaagaggacacaaaaaatggaaagatactccatgttcattgattggaagaatggatatttttaaaatgtccatactaccaaagcaatctacagacagtgcaatcgctatcaaaataccagtgacattcttcacagaaatagaaaaaagaatcctaacatttacatggaaccacgaaaaaaacagaatagccaaagctatcctcagcaaaaagaacaaaactggagaaatcacattacctgacttcaaattatactacagagctagtaaccaaaacaccatggtacaaagaaaagagacacatagaccaatggaacagaatagagaatgcagacataaatccacaaatctacagtgaactcatttttgacaaagtttctaagaatgtatattggggaaaagaccgtctcttcaaaaaatggtggtgggagaactggatatccatatgcataaaaatgaaactaaatccctttctctcaccatatacaaaaataaaatcaatatggattaaagacttaaatctatgacctgaaactatgaaactactaaaagaagacactggaaaaactctctaggacattagattgggcaaagatttcttgagtaatacccctacaagcacagggaaccaaaacaaaaatggacaaatggatcacatcaagttaaaaaccttctggactgcagaggaaacaatcagcaaagtgaagagacaacctgcaaaatgggagaaagtatttgcaagctatccatctgacatcagattaataaccagaatatatgaggaactcaaacaactcaataggaaaaatctccaattaacaaatgggcaaaagatctgaatagacatttctcaaaagaagctatacaaatggcaaacaggtatatgaaaatatgctcaacatcattgatcatcagagaaatgcaagtcaaaactataatgcgatatcatttcaccccagttaaaatggcttttagccaaagataggcaataacaaatgctggcgaggatgtggagaaaagaaaacccttgtacactgttgtacaacttgtacatttttgagaatgtaaattagtacaaccatgatggagaacagtatgggggttcctcaaaaaatggaaaattaaactaccatatgatccagttatccctctgctggggaaatactcaaaagaaaggaaaccagtatatcgaacctgcactcccatgtttcttgcatcactattcacaatagccaggatttgggagcaacctaagtgtccatcagcaagtaaatggatgaagaaattatgatacatacacacaatggagtactattcatccttaaaaaaatgagatcctgtcatttgcaacaacaaaaatggaactggaggagattatattaagtgaaataagccaggcacagaaagacgaacttcacatttctcacttatttgtgggagctaaaaaattaaaacaattggacttatagagatagtagaatgacatttaccagaggccgggaagtgtagtggggtggcagaggtagaagtggagatggttaaaggatacaaaaatatatagttagctagaatgaatatcatctagtatttgatcacacaacagggtgactacagtcaacaacaatttattgcacatttaaaaataactaaaagggtataactggattgtttgtaacacaaagaaaggataaatttttgaggtgatagataccccattcaccctaatgtgattattatccattgtatgcctatgtcaaaatatctcatacaccctgtaaatatatacatctactatgtaccacccaaattaaaaataaattaaaattaaaattaaataaatttaaaaataaaactaaaaaaaccaggactatcaacttggctttatttaagttgaatgtgatgttaaatcctctgggatagaatatggagaaaagtagaaagaatgggagccccaagccttgaggaagaactcaactgttagcaataactgaagccaaccctcattgaacatttactatttgctgggtcttgttcttggagctttacatgcagtaactcttttaattcttaaatacacatgagattaatactattatatatgtgtgtaaaagtatctatatatacttacatataattatattttatatataatatatacttacacacacacttatatatagtgtgtgtgtatatgtatagctctgtgaaaccatttgcaaattttttgaataggttaagttatagcagatacaacaggttgggcactggatatataaagataaacaaaatatagtacagttttctaagaccataataatatatggtataataatatttttggttaagggttttcaagccaaaaagtagaattagttacaatgtaatctctgcaatatattagaaaaacagcaaaaaaaaaaaagatcaatatacagatagtacctaacccattctaggtgcttaagaaattggatgaataaataaaagactgaataatagaattttgtaggtgaaaaggggcttagatgttatctagcctgaacccataatttatagacatacatgcccaggaggttgaattaatgtggccataatggaattgcttgcgggttgacagagctgaattcctgggccaggaatcctactttttagtctggtatcttttccactctgctagtggttttcacactctgcctaaattggaagcaaatgccagcacttggtcttttaaatctcttggatgctgccctgtaagtttgatttttagtgtgtcaggaaggtcaggcaagaggcacagctcttcaggccagaggtatataaacagctcacataaaaagactgtagttcctggaatcatctctgtcacctgcagtaagcccaactacactgagtcacagccttcagtttgggccaatgccatagggatttatcatttaggcaaaagatccaaattccccttccctgcggttgatggagctttctgcacaagaagagtagtttattggtttattagagcttcttaaatgggtagaaaagctaaatgaaaaaaaaacggaagttcctgggaaaaactgtgctaaataggtcagcagtgttaccctgtcacctgaagtttgaggcctaaaagtgaaaggatttcttacttgaacagaaatccgatgatattagagaaagtggctctcattctgggtttatcttcagtgtctggaatgatgcctggcatgaagtctctgtggaagacagtttgaaaaccaccttttcaatataatttcagtttaccaattagggaattatcaatgcatcatcaaaggataagactatactaatgtatccatgttatatattttttattcatactgttcttaagtgttcagttattaaagttactaaatgtactgaagtatttaggtcaaataaaaaatccctaaatggtacagtcttatcctttaaagtcttgcttgggtttagaaaaggcttttcttgccaggtagaaaggtctaatgtatctctctttaatcttaaaatatgtgagacacttgtatacaaagtaggagaatggttggatggaatattttgataaatggtctggcttgtgtagtagctctgtgaaaccactcgtaaattttttgaatatgctaagttatagcagatacaacaggttgggcactggatatataaagataaactagatatagttcagttttctatgacctcacaccagtgggagtgggaggaagagataggtgtaaatagtcatacttctatttttgtatgacttagtaagttgaatcatctgtcaattactacggagttctattgcaagatgagtcactctgctaggggtaagatgatgtaatactttagtttattcatggaggaagagtatattccaggagaaaaattttgataaagggcattccagttagagaaagcagaatggataaagccttgaaggaagaaaataggatagttagggaacagtaaactcttcggtgtgcttacagccagggctacacagaagtgagcaaagctggtgaagatggggatgggggagtggagtgagttgacgctagaaagggatgtagcaaatgtaactattattccagaatccaagtgtgcaaaaatcataacttttattttgtataacataatttctattttgagtccctcttcagtaaatgtggcaaaaacccaatctcagttattttggggtagctctcacctttccctggggtgtgtcttggaggccaacatagtttcagatgagtgagaaggccaagtgttgttcagcatcatcatctacataggcattccgtcaagctctctcgtcctcctctcttagaagctttgatgtcattctgttccttccgtgtctctctaggtccaaggagattcttggaagctgttctaaagccgtcccttcaactcactacatatttccttttctgaggtcttgctctagggtctgcttaggtggaaggaggcaggcttcttttacctggaccctccagtgcctatgtagtcagcaattctcaactacttattttcttctcagcatgtggaaaatattttttcagtctaaagggtggagcttaatctcatgaaatttaaacaaaatattctgtcatgctcagtttcctctccaaccctcaaaggcataggctttgggaacattttatatatatatatcgtgtaggtttcttcttggcttttattacatatataaatttttttaatgcagcagcagctctctctgaagacagtgactgcacagtgctctagctactgaaatgaggagataggtgtgggggtaaaggaaatatctggtaaatcattgttggtactttaaacatattttctttcatgtgtatattgtggcaagattgcaaaagaactaatatgatgtatcatggatcttgatctttatcctttatgcagtggactgtcattgaaggttatcaatggaagcactatgattatacttttgctttcaaatataaaatctggggacaatatgaagacctaactggggtagaaagattagttacagtagtcttgttacaggagaggtaagaaatgatggggacttgaaccagagcattaactgtgaagagggagaggatttgaatagctctagatatattttggagtcactgaagctgtggaagtggctgaggtcagcctggagcctgcatagagttctgggaaacatcagtgtgtaggaaagagggagagcataaggggtcagtaactgagactaagggagaagcatcagagtggtggaagtaggagaaccaggataatgaggtcctacaaactggtgataaccttcaatgacagtccactgcataaaggatgatggttttattaatgggagttcccctgcatgtgccctcttgactgtcgtcatgtaagacatgcctttgcccctcctttgccttctgccatgattgtgaggcctccccagccatgtggaactatgagtgcattaaacctctttttctttataaattacccagtctcaggtatgtttttatcagcagcatacgaatagactaatatagttacataggtaaatgtgtgtcatggggtttttgtgtagagattatttcatcacccaggtattaagcctagtacccactagttatttttcctgattctctccctccccccaccctccacactccaaaagtctccagtgtgtgttgtttccctctgtgtgtccatgtgttctcatcatttagatcctacttataagtgaaaacgtggtatttggttttctcttcctgtgttagtttgctaaggataatggcctccagccccctccctgtccctgcaaaggacatgatctcattcttttttatggctgcatagtattccatggcatctatgtaccacattttctttatccagtctgtcattgattggcatttaggtttattgcttttgtgaatagtgctacaatgaacatatgcatgcatgtgtctttataatagaattatttatacttctttgttgaatgcccaatttttattttgactggtacactttgaaaggtgaagcacaaataaaaggaacttggtgctagacttgttttctatgtattttgatggctgaagctataggtatggtgtaattggacatacaaacataaaggaggcaattttgaccttgaacaaaattttttactttttgagctatttagaaatgactgtagacttagaagacatcattgctgaagaacatttatttaaattatcttggtttcttatcttaagaattgagaaaactggtagaaacaatgagtagaaaacagatatttagttagacttgaaaactggtcttcatttggtagtgacatactggcaacaattaatactatatagagacatttcctggtaaatacagaagatacataatgtaagctttcccaagattgatttggagaaaaatcctcacctgactattcaatgtcctgtttcatttttgaaaacgtggagcagaagaaatctcacaactgatttaaataaaaattcaatctgaaaaagtttattgttgtattgacataaggcaaagcagtcaagaatccctcttgcatgtttttctaagcttctgcatctctttgtttcttccttaccttctgtcttaccctttaatggagttttctccaggattctgtgcttggcctgctgttttctccctatctgctggcctgtccttatgggtaaggagagatggatttagctatggcctctagcacatgaatcctaaatctttagatctgaactgtctctaaaactggaaagttacggtctgaatacttattggacatcttcaattgaatgtgccaggcactgcaaaacaaaaatgttcaagaccaaactaataatctctcctctgaccagggtagctctttttgctgacttcttatttcccaccatgacactagcattctccaaatgcttaggcttgatgttttgatcatttttaaaatttttactctctctacttatattctatcagttgctaagtcctgtaacttcttcctctataagtctcataagtatttgctttcttttctattctcatttagactctctttccctacatagttatagtagctgaagtcccttagtctctccacattccagttaatcgtatacattgctggtggctaaactctcgtagaacatacttctaattatatcctattttgctcaaaactgtcgaacaactgctggtctgttttcttgcaccatacctgcaggacccagattatctttccagctacataaccacctccctccatccacacaacacacttcctacccctgtcaaaaacaggcttacccattcttcaaacttgccgttgacttttgtccatattgttcactttgctagaaatagtttttcccctcttttccataccagttgaaatcagactcaactgaaacaggccctttcattttaacataactttttgcagtctcgattgtgataatttatcctagaaaatatttactctttgtacatttataacatatgtgtataagtatgtttaacacagcattgcttgtaacagtaaaatattggaaacaagtgaaatagttgcaacattgaaaaaatagatacacacatatatatactgacaggaaaaaatttggccactaaatgtaaactatgactccattgttaaaaaataagtgtgtgtgcttgtgtgtatatacatgcgtacataaaatctgaaaatgtacacacaaaaatgttgaattgtgctcgtgtgtgtatatgtgtctgagtgtgtgtgtgtgtgtctgtgtgttaggggtaaagttatgaaatacttttataatgtactttttatccaaaaatgttagcatttgctaatattgggtgatgagctcactggtgtttattacactgttctttgtatttgatatttttaaataagaataaaactggaaaaatgctaagattttaaatatataccttagtaccaagtactcaatggcatttatcaggacaaaagatttttctttagtgggatcttggagtgatattccaaaaaatattttaattcaaggacactgatatttctgctgacagactacctcttaccaaatgtgggtttcttcttgcaaataaacatcactgagttggtgtatatgtggttgcacacagtcagcagagaagtatttgaatgaatgccataatgcttacacacaattaaaactgagtcagttcgacctatttttatgtaaatcattaaatgaaatgagtttgattcatttttacatgtttatttttaatggagactaaagagacataaatggtatgtttgttttgtggtggtctaggtgatatcaatgatacagggttcttcatgaatctggaggaagacatgaccaggtaattagacattctccttactattgttaagtttttctatattcatcaagttgtagaaatgtttaaaactttgcattatcatcacagaaattttaaggagaacaatactcttgatagtttttagaagagtatatgtagactttttaagaaaagaattggctgcataaagtatacaaaagttagagttaagcttaaaatggacatatatgcattgatcaatgtagaatatcatattaatatataaggaaattagaggagtttaaggtagtcttttaaaatgcagttgaattaagaatcattattttctataatatatatgtgccaggtgtggtggcacatagctacagtcctagctacttgggaggctgatgtgagaggattgcttgagcccaggagttcaaagctgcagtgagctatgatcacatcactgcactccagcctgggggaaagagcaggaccctgtcccccacacccccccacaaaaaaagagagagacagaataattattttcaatggcttataattattaatttgtttcctggatgttttcatacgacatgacaatgaaagcagccaaaagaaattttttttaaactcaacatctgattctgaacaataaaataaaacatcccagaaaaaatacagtctctctattcttaactcacactggggaagcttttggttaatgatttacatatcttgaagtttattctccagaacagcttataacagatgtccaaaggtacgtgtaggtgaatcagaagaaaatgattttacattactgtgtaaatgatctgggtacatttgaaaaaaatagatttttttttttttttttttttgagacagagtgtcactctgtcccccaggctggagtgcagtggtgcgatctcggctcactgcgaccttcgattcctggcttcaagcgattcttgtgtctcagcttcccaagtggctgggattacaggcgtgtgtcactacacccagctaatttttgtatttttagtagagatggggtttcaccatgttacccaggctggccttgaacttctgacctcaggtgatccacccaccttggccttccaaagtgctgggattacgggtgtgagccgccatgccctgccgaaaatggagacactttatcatattttgaaagctgaggaccaaatacctccaaatattcctgtggagaggcattgttttttacattggggaaaatgaaacagaatgtcttttaatcatcatgtacatgcttttgagtaaacatacactgacagtttaaaatacattaacttattctcaaagcatgagttttccttgtgatgtggggtttctattagctatctcttgctatataatgaacacttagatagaatactatctcttgttgtatcatgaacacttagatagtaattagttattgagttatctgttaactaaaacttagtgttctaattacatcttccttgataaatgcattgtaagttacaaggtagagtttggggaaaacttgtttcccaagattcctgatgggctgagtgctgaattgtgaacagcaatgtcagagactgtctgcttgttacctagccatctttatagcttctgcatgattcaaacacacagtttaatttgaagatggtaagtagtgaagtttaaaaagtgggaatattggaatactgtattttattttagaatgtttgcctttaacctaaaaattaattgtttagtgaagcccaagaattgtttgcattttttttttttgagatggagttttactctgtcacccaggttggagtgtagtggcacgatctctgtgcactgcaacttctgccttcaagcgattctcctgcctcagcctcctgagtagctgggattacaggtgtgcaccaccacacccggctaatttttattattattattattattattattgtcgtatttttagtagagacgggatttcaccactttggtcaggctggtctcgaactcctgacttcatgatccgcccaccttggcctcccgaagtgctgggattacaggtgtgaattgtttgcttttctttttttttttttgagatggagtccagctctgtcacccaggctggagtgcagtggcacgatctcggctcccggcaacctctgcttcctgggctcaagcgattcttctgcctcagcctcccaagtaaccaagtagctgggactacagtcgcacgccaccacgcttggctaatttttttgtattttttgtagagacagggtttcatcatattggccagggtggtctccaactcctgaccttgtgatctgtctgcctcggcctcccaaagtgctgggattataggcgtgagccaccacgcctggcctgtttgcttttttaaatatgaaaactcagagcaaggaaacattaattcaggatttctagattgattaagggtctgttttttaagacaatactcgtgttttttaatgctagaatttaaattggaagggccactatttgattcgttaagcattttaggataactcacgatggccagttgggcaaatgaaataaaactactttttaaaaatttcatttgtctcttggcatctaaactctactagattaatagcccaagggataatccctagcccaaaaggccaagggattatttccatttcttgatcccactttctgacaagttctgtcacttcttttcatccccaatgtacagagaccaacccaatgcacttatcaactgatgctgatgtaataaaaatattacagtggtgggtcttacctgatgctgtgattccccaatataccacaccatctttcacagtaactggcattctctgagtgcttactatgtgctgggcactggtccaagtatatttcatgcatgagtatttttatctctgttttactaattagaaaactgaggcttagaaaagttaagcagcttgcctaagattacataacagtgaagtgaagagctgggatttgagccaaagcagaaatcattcttaaccattccaccatattggtgcaaacatagttggatggtgactatcaactctgcttgttacaaccccttcttatttgttaaggatggcgagatacccagataagtgaaaaaataggaatgagtggtctctttggaaaaggtacattgattaggaaacagagagcatgtgcagtgttcttgttgtttttcaggtatgcctattattacagtggaattggtgctggggtgctggttgctgcttacattcaggtttcattttggtgcctggcagctggaagacaaatacacaaaattagaaaacagttttttcatgctataatgcgacaggagataggctggtttgatgtgcacgatgttggggagcttaacacccgacttacagagtaagtatttagttttatgttgaacttgggtgtcgttcttatccttagtaaaatgaaatagatgtcatcacatctgttaggaggtgttaatgtatcattcaaaggtacttatgagacaaaattccttctaagcagcaacaatgtcgtgtgcatccttttgttcccagtgccttgacagggtatggggggacctgcatgactagcattaaatgaaggactgggctttgccagaatgaagaaatcctctgagaatgtgcagtagagcaaaacaagatactttctgaggaaatttctgagcaatttgaaattcctaggttgaatacttcttgtgtacacgatgtccatttcctggggccatgtgggctatggatttttgttgttaatgacaaatatcctagtagaaacttctaccctgctaaataaaacaaagcataggcacaaaatactctagccataaactaccctacactcaaaacaggcttcacgagaaaagttgatgtttacaattctgacaattatttctaacactatctgttctttcagtgatgtctccaagattaatgaaggaattggtgacaaaattggaatgttctttcagtcaatggcaacatttttcactgggtttatagtaggatttacacgtggttggaagctaacccttgtgattttggccatcagtcctgttcttggactgtcagctgctgtctgggcaaaggtaggtgaagcctgtgaatccagattttgaactgcaccttctcccttcctgctctcaccctacggaaaggtctttttactacatgatgactctgattctgtacttgttacttttacgttttctgttcaaaatcagctggataagcatatccagcctcactgagtactacccctgccaagactccatgctgttcttggccatgtgattatttggggaagggatgagaaagaagaatgtagctctcatatctaccttctgcctttgtaagaaaacgagcaagtaaacaaacaaaaacaaaaacaaaacaaaaaaaaaaaacttgaactccaaagaaccatgctctctagtggatgatgccccattcacacggcaagtagagactcaagtttagtgaactacagatgtcccattcaattaacatttttttttactttaatgtttttggctttctagatttttgtttaagttttaaattgattttacagttttgtcagcattcaaacacagttaaatttttggttataaaataatttaagaaaacagatactttctagtccctaaggatgcatataaatccttggccttcagctctctctcctgtcatgaaggcagagaggtagaagtggccctctctaccccagcacacgtttccagtgatcttttaaaacttattttccatttcaaggtgaacatggtgttaattttaaactgatttgatatgagtgtattttcagtagagaaattggcccagtatgtaatttttgtggagttcaacacaactcagataaggcaatataaattcatgtagcaaaagtaatgaatggacaaccaaaaccaagcatcacacaaaataagtcaggtagtaagtattaagaaactgtagaaattttaacctgtataatggatattattttgtttctgcaaataataattatcatttattgagcatttattgtcacgcaaatgcctgtgttatctttctgaagtataggtattatctcactttacagagaaagaaactgaagttctcaggtctctgttaattttttgctcagagtaacatagagttcaaataatgtttctggggattatcagttaactaaaatatttggcaaaagcttcttgtcaattgatttttctgtatactagaatgttaagcaagttaggtggcaaactcttcacatcagtatttgttgaaaaattacttaaaatgttttgatgtctgttttaagattaaaaacagaccatgagttaatcttttaatgattaattatgcattgcttcacatgccatttatttagtaaaaggagccccaggctggctgctagagacctaagctttaatcctcactcagcattacacttttggtatcatttcaaacaaatttcttaaattctttggatgtcaatcatatcaaaaaagaaatgtagttcactctgtgtctgggaagcctctttgtgtctgtgagcctgaggctctaccttcaaacctagagacacagaagcaaatagatatagcagaaagggacccaatcacagcaagtgacctggcccaggaagcctcttttgtactttgtgcccaagactgtcttcccagcgcccagagacactgggccactagagggcattggtacaggaaaccaccacactcttcccgacctggcagtctgatcttgaaaaaccactttcactccctcaagcagcagaagcaggggccagtgggagccccagaagctt

1. A method of using irinotecan to treat a patient suffering from cancer which comprises:
(1) determining if the patient has one or more variant alleles of the MRP1 gene in the cancerous tissue;
(2) in a patient having one or more of such variant alleles, administering to the patient an amount of irinotecan which is sufficient to treat a patient having such variant alleles which amount is increased or decreased in comparison to the amount that is administered without regard to the patient's alleles in the MRP1 gene.

2. The method of claim 1, wherein the cancer is colorectal cancer, cervical cancer, gastric cancer, lung cancer, malignant glioma, ovarian cancer, or pancreatic cancer.

3. The method of claim 2 in which:
(1) the one or more variant alleles result in the patient expressing low amounts of the MRP1 gene product, whereby the amount of irinotecan administered to the patient is decreased to avoid toxicity; or
(2) the one or more variant alleles result in the patient expressing high amounts of the MRP1 gene product, whereby the amount of irinotecan administered to the patient is increased to enhance efficacy.

4. The method of claim 3, wherein the one or more variant alleles are in the promoter region of the MRP1 gene.

5. The method of claim 3, wherein the one or more variant alleles are in the coding region of the MRP1 gene.

6. The method of claim 3, wherein the one or more variant alleles are not in either the promoter region or the coding region of the MRP1 gene.

7. The method of claim 3, wherein the one or more variant alleles are in both the promoter region and the coding region of the MRP1 gene.

8. The method of claim 3, wherein the one or more variant alleles comprises a polynucleotide selected from the group consisting of:
(a) a polynucleotide having the nucleic acid sequence of any one of SEQ ID NOs:169, 170, 173, 174, 177, 178, 181, 182, 185, 186, 189, 190, 193, 194, 197, 198, 201, 202, 205, 206, 209, 210, 213, 214, 217, 218, 221, 222, 225, 226, 229, 230, 233, 234, 237, 238, 241, 242, 245, 246, 249, 250, 253, 254, 257, 258, 261, 262, 265, 266, 269, 270, 273, 274, 277, 278, 281, 282, 285, 286, 289, 290, 293, 294, 297, 298, 301, 302, 305, 306, 309, 310, 313, 314, 317, 318, 321, 322, 325, 326, 329, 330, 333 and/or 334;
(b) a polynucleotide encoding a polypeptide having the amino acid sequence of any one of SEQ ID NOs: 600, 602 and/or 604;
(c) a polynucleotide capable of hybridizing to a Multidrug Resistance Protein 1 (MRP1) gene, wherein said polynucleotide is having at a position corresponding to positions 57998, 57853, 53282, and/or 39508 of the MRP1 gene (Accession No: GI:7209451), a substitution or deletion of at least one nucleotide or at a position corresponding to positions 137667, 137647, 137710, 124667, and/or 38646 of the MRP1 gene (Accession No: AC026452), a substitution or deletion of at least one nucleotide or at a position corresponding to positions 27258, 27159, 34218, 34215, 55472, and/or 34206 to 34207 of the MRP1 gene (Accession No: AC003026), a substitution or deletion of at least one nucleotide or at a position corresponding to positions 21133, 14008, 18067, 17970, 17900, and/or 18195 of the MRP1 gene (Accession No: U91318), a substitution or deletion of at least one nucleotide or at a position corresponding to positions 79, 88, and/or 249 of the MRP1 gene (Accession No: AF022830), a substitution or deletion of at least one nucleotide or at a position corresponding to positions 95 and/or 259 of the MRP1 gene (Accession No: AF022831), a substitution or deletion of at least one nucleotide or at a position corresponding to positions 150727 and/or 33551 of the MRP1 gene (Accession No: AC025277), a substitution or deletion of at least one nucleotide or at a position corresponding to position 174 of the MRP1 gene (Accession No: AF022828), a substitution or deletion of at least one nucleotide or at a position corresponding to positions 248 and/or 258 of the MRP1 gene (Accession No: AF022829), a substitution or deletion of at least one nucleotide or at a position corresponding to positions 1884, 1625, 1163, 381, 233, 189, 440, and/or 1720 to 1723 of the MRP1 gene (Accession No: U07050), a substitution or deletion of at least one nucleotide or at a position corresponding to positions 926927 and/or 437/438 of the MRP1 gene (Accession No: U07050) a insertion of at least one nucleotide or at a position corresponding to position 55156/55157 of the MRP1 gene (Accession No: AC003026) a insertion of at least one nucleotide;
(d) a polynucleotide capable of hybridizing to a MRP1 gene, wherein said polynucleotide is having at a position corresponding to position 21133, 14008 and/or 18195 of the MRP1 gene (Accession No: U91318) or at a position corresponding to position 27258 and/or 34218 of the MRP1 gene (Accession No: AC003026) or at a position corresponding to position 79 of the MRP1 gene (Accession No: AF022830) or at a position corresponding to position 57998, and/or 57853 of the MRP1 gene (Accession No: GI:7209451) or at a position corresponding to position 137667 and/or 137647 of the MRP1 gene (Accession No: AC026452) or at a position corresponding to position 150727 and/or 33551 of the MRP1 gene (Accession No: AC025277) or at a position corresponding to position 248 of the MRP1 gene (Accession No: AF022829) or at a position corresponding to position 1884, 1625, 233, and/or 189 of the MRP1 gene (Accession No: U07050) an A, at a position corresponding to position 39508 of the MRP1 gene (Accession No: GI:7209451) or at a position corresponding to position 17900, 18067 and/or 18195 of the MRP1 gene (Accession No: U91318) or at a position corresponding to position 174 of the MRP1 gene (Accession No: AF022828) or at a position corresponding to position 440 and/or 1163 of the MRP1 gene (Accession No: U07050) a T, at a position corresponding to position 88 of the MRP1 gene (Accession No: AF022830) or at a position corresponding to position 95 of the MRP1 gene (Accession No: AF022831) or at a position corresponding to position 27159, 55472 and/or 34215 of the MRP1 gene (Accession No: AC003026) or at a position corresponding to position 124667 and/or 38646 of the MRP1 gene (Accession No: AC026452) or at a position corresponding to position 53282 of the MRP1 gene (Accession No: GI:7209451) or at a position corresponding to position 137710 of the MRP1 gene (Accession No: AC026452) a C, at a position corresponding to position 249 of the MRP1 gene (Accession No: AF022830) or at a position corresponding to position 258 of the MRP1 gene (Accession No: AF022829) or at a position corresponding to position 259 of the MRP1 gene (Accession No: AF022831) or at a position corresponding to position 381 of the MRP1 gene (Accession No: U07050) a G, at a position corresponding to position 17970 of the MRP1 gene (Accession No: U91318) a deletion of a T or at a position corresponding to position 34206 to 34207 of the MRP1 gene (Accession No: AC003026) a deletion of a AT or at a position corresponding to position 1720 to 1723 of the MRP1 gene (Accession No: U07050) a deletion of GGTA, at a position corresponding to position 926/927 a insertion of a T and/or 437/438 of the MRP1 gene (Accession No: U07050) a insertion of a TCCTTCC, at a position corresponding to position 55156/55157 of the MRP1 gene (Accession No: AC003026) a insertion of TGGGGC;
(e) a polynucleotide encoding an MRP1 polypeptide or fragment thereof, wherein said polypeptide comprises an amino acid substitution at a position corresponding to positions 600, 602, and/or 604 of the MRP1 polypeptide (Accession No: G2828206);
(f) a polynucleotide encoding an MRP1 polypeptide or fragment thereof, wherein said polypeptide comprises an amino acid substitution of Phe to Cys at a position corresponding to position 239 of the MRP1 polypeptide (Accession No: G2828206) or/and Arg to Ser at a position corresponding to position 433 of the MRP1 polypeptide (Accession No: G2828206) or/and Arg to Gin at a position corresponding to position 723 of the MRP1 polypeptide (Accession No: G2828206).

9. The method of claim 8, wherein the one or more variant alleles comprises a polynucleotide selected from the group consisting of:
(a) a polynucleotide having the nucleic acid sequence of any one of SEQ ID NO: 181, 209, 217, 205, 277, 281, 301, 325, 229, 193, 313, 293 or 253;
(b) a polynucleotid encoding a polypeptide having the amino acid sequence of SEQ ID NO: 600;
(c) a polynucleotide capable of hybridizing to a MRP1 gene, wherein said polynucleotide is having a substitution at a position corresponding to position 137647 of the MRP1 gene (Accession No: AC026452), 95 of the MRP1 gene (Accession No: AF022831), 53282 of the MRP1 gene (Accession No: GI:7209451), 249 of the MRP1 gene (Accession No: AF022830), 259 of the MRP1 gene (Accession No: AF022831), 124667 of the MRP1 gene (Accession No: AC026452), 381, 440, 1625 of the MRP1 gene (Accession No: U07050), 34218 of the MRP1 gene (Accession No: AC003026), 18067 or 17900 of the MRP1 gene (Accession No: U91318) or an insertion of at least one nucleotide at a position corresponding to position 926/927 of the MRP1 gene (Accession No: U07050);
(d) a polynucleotide capable of hybridizing to a MRP1 gene, wherein said polynucleotide is having a T at a position corresponding to position 137647 of the MRP1 gene (Accession No: AC026452), 18067 or 17900 of the MRP1 gene (Accession No: U91318), 440 of the MRP1 gene (Accession No: U07050), a C at a position corresponding toposition 95 of the MRP1 gene (Accession No: AF022831),124667 of the MRP1 gene (Accession No: AC026452), a G at a position corresponding to position 53282 of the MRP1 gene (Accession No: GI:7209451), 249 of the MRP1 gene (Accession No: AF022830), 259 of the MRP1 gene (Accession No: AF022831), 381 of the MRP1 gene (Accession No: U07050), or an A at a position corresponding to position 34218 of the MRP1 gene (Accession No: AC003026) or 1625 of the MRP1 gene (Accession No: U07050) or an insertion of a T at a position corresponding to position 926/927 of the MRP1 gene (Accession No: U07050);
(e) a polynucleotide encoding an MRP1 polypeptide or fragment thereof, wherein said polypeptide comprises an amino acid substitution at a position corresponding to position 329 of the MRP1 polypeptide (Accession No: G2828206); and
(d) a polynucleotide encoding an MRP1 polypeptide or fragment thereof, wherein said polypeptide comprises an amino acid substitution of Phe to Cys at a position corresponding to position 329 of the MRP1 polypeptide (Accession No: G2828206).

10. The method of claim 8, in which the one or more variant alleles results in the patient expressing low amounts of the MRP1 gene product, whereby the amount of ironotecan administered to the patient is decreased.

11. The method of claim 8, in which the one or more variant alleles results in the patient expressing high amounts of the MRP1 gene product, whereby the amount of irinotecan administered to the patient is increased.

12. The method of claim 9, in which the one or more variant alleles results in the patient expressing low amounts of the MRP1 gene product, whereby the amount of irinotecan administered to the patient is decreased.

13. The method of claim 9, in which the one or more variant alleles results in the patient expressing high amounts of the MRP1 gene product, whereby the amount of irinotecan administered to the patient is increased.

14. A method for determining whether a patient is at risk for a toxic reaction to treatment with irinotecan which comprises determining if the patient has one or more variant alleles of the MRP1 gene.

15. The method of claim 14, which further comprises administering to the patient reduced amounts of irinotecan.

16. A method for determining the optimum treatment regimen for administering irinotecan to a patient suffering from cancer which comprises:
(1) determining if the patient has one or more variant alleles of the MRP1 gene;
(2) in a patient having one or more of such alleles increasing or decreasing the amount of irinotecan in comparison to the amount that is administered without regard to the patient's alleles in the MRP1 gene.

17. A method of treating cancer in a patient having one or more variant alleles of the MRP1 gene such that expression levels of the MRP1 gene product are lower than in the general population and so indicates high sensitivity to irinotecan which comprises administering to the patient a decreased amount of irinotecan.

18. A method of treating cancer in a patient having one or more variant alleles of the MRP1 gene such that expression levels of the MRP1 gene product are higher than in the and so indicates resistance or predisposition to resistance to irinotecan which comprises administering to the patient an increased amount of irinotecan.

19. The method of claim 18, in which patients that have a variant allele that indicates resistance or predisposition to resistance are treated with an MRP1 inhibitor.

20. The method of claim 19, wherein the MRP1 inhibitor is selected from the group consisting of SDZ-PSC 833, SDZ 280-446, MK571, MS209(quinolone derivative), PAK-104p, Verapamil, Benzbromarone, Dipyridamole, Furosemide, Gamma-GS(naphtyl)cysteinyl-glycine diethyl ester, Genistein, Quinidine, Rifampicin, RU 486, Sulfinpyrazone.

21. The method of claim 17, which further comprises monitoring the patient during treatment by assaying for changes in expression levels of the MRP1 gene product in the cancerous cells whereby an increase in the expression level of the MRP1 gene product is compensated for by an increase in the amount of irinotecan administered to the patient.

22. A method of treating cancer in a patient which comprises internally administering to the patient an effective amount of irinotecan, wherein the treatment regimen is modified based upon the genotype of the patient's MRP1 gene.

23. A method of treating a population of patients suffering from cancer which comprises:
(1) determining, on a patient by patient basis, if the patient has one or more variant alleles of the MRP1 gene;
(2) in a patient having one or more of such variant alleles, administering to the patient an amount of irinotecan which is sufficient to treat a patient having such variant alleles which amount is increased or decreased in comparison to the amount that is administered without regard to the patient's alleles in the MRP1 gene.

24. A method for predicting sensitivity to irinotecan in a patient suffering from cancer which comprises determining if the patient has one or more variant alleles of the MRP1 gene, which alleles indicate that the cancerous cells express low or high amounts of the MRP1 gene product, whereby low expression indicates high sensitivity to irinotecan and high expression indicates resistance or predisposition to resistance to irinotecan.

25. The method of claim 24, in which patients that have a genotype that indicates resistance or predisposition to resistance are treated with a MRP1 inhibitor.

26. The method of claim 25, wherein the MRP1 inhibitor is selected from the group consisting of SDZ-PSC 833, SDZ 280-446, MK571, MS209 (quinolone derivative), PAK-104p, Verapamil, Benzbromarone, Dipyridamole, Furosemide, Gamma-GS(naphtyl)cysteinyl-glycine diethyl ester, Genistein, Quinidine, Rifampicin, RU 486, Sulfinpyrazone.

27. The method of claim 26, wherein the patients that have a genotype that indicates resistance or predisposition to resistance are monitored during treatment by assaying for expression levels of the MRP1 gene product in the cancerous cells.

28. Use of irinotecan or a derivative thereof for the preparation of a pharmaceutical composition for treating colorectal cancer, cervical cancer, gastric cancer, lung cancer, malignant glioma, ovarian cancer, and pancreatic cancer in a subject having a genome with a variant allele which comprises a polynucleotide selected from the group consisting of:
(a) a polynucleotide having the nucleic acid sequence of any one of SEQ ID NOs: 169, 170, 173, 174, 177, 178, 181, 182, 185, 186, 189, 190, 193, 194, 197, 198, 201, 202, 205, 206, 209, 210, 213, 214, 217, 218, 221, 222, 225, 226, 229, 230, 233, 234, 237, 238, 241, 242, 245, 246, 249, 250, 253, 254; 257, 258, 261, 262, 265, 266, 269, 270, 273, 274, 277, 278, 281, 282, 285, 286, 289, 290, 293, 294, 297, 298, 301, 302, 305, 306, 309, 310, 313, 314, 317, 318, 321, 322, 325, 326, 329, 330, 333 and/or 334;
(b) a polynucleotide encoding a polypeptide having the amino acid sequence of any one of SEQ ID NOs: 600, 602 and/or 604;
(c) a polynucleotide capable of hybridizing to a Multidrug Resistance Protein 1 (MRP1) gene, wherein said polynucleotide is having at a position corresponding to positions 57998, 57853, 53282, and/or 39508 of the MRP1 gene (Accession No: GI: 7209451), a substitution or deletion of at least one nucleotide or at a position corresponding to positions 137667, 137647, 137710, 124667, and/or 38646 of the MRP1 gene (Accession No: AC026452), a substitution or deletion of at least one nucleotide or at a position corresponding to positions 27258, 27159, 34218, 34215, 55472, and/or 34206 to 34207 of the MRP1 gene (Accession No: AC003026), a substitution or deletion of at least one nucleotide or at a position corresponding to positions 21133, 14008, 18067, 17970, 17900, and/or 18195 of the MRP1 gene (Accession No: U91318), a substitution or deletion of at least one nucleotide or at a position corresponding to positions 79, 88, and/or 249 of the MRP1 gene (Accession No: AF022830), a substitution or deletion of at least one nucleotide or at a position corresponding to positions 95 and/or 259 of the MRP1 gene (Accession No: AF02283 1), a substitution or deletion of at least one nucleotide or at a position corresponding to positions 150727 and/or 33551 of the MRP1 gene (Accession No: AC025277), a substitution or deletion of at least one nucleotide or at a position corresponding to position 174 of the MRP1 gene (Accession No: AF022828), a substitution or deletion of at least one nucleotide or at a position corresponding to positions 248 and/or 258 of the MRP1 gene (Accession No: AF022829), a substitution or deletion of at least one nucleotide or at a position corresponding to positions 1884, 1625, 1163, 381, 233, 189, 440, and/or 1720 to 1723 of the MRP1 gene (Accession No: U07050), a substitution or deletion of at least one nucleotide or at a position corresponding to positions 926927 and/or 437/438 of the MRP1 gene (Accession No: U07050) a insertion of at least one nucleotide or at a position corresponding to position 55156/55157 of the MRP1 gene (Accession No: AC003026) a insertion of at least one nucleotide;
(d) a polynucleotide capable of hybridizing to a MRP1 gene, wherein said polynucleotide is having at a position corresponding to position 21133, 14008 and/or 18195 of the MRP1 gene (Accession No: U91318) or at a position corresponding to position 27258 and/or 34218 of the MRP1 gene (Accession No: AC003026) or at a position corresponding to position 79 of the MRP1 gene (Accession No: AF022830) or at a position corresponding to position 57998, and/or 57853 of the MRP1 gene (Accession No: GI:7209451) or at a position corresponding to position 137667 and/or 137647 of the MRP1 gene (Accession No: AC026452) or at a position corresponding to position 150727 and/or 33551 of the MRP1 gene (Accession No: AC025277) or at a position corresponding to position 248 of the MRP1 gene (Accession No: AF022829) or at a position corresponding to position 1884, 1625, 233, and/or 189 of the MRP1 gene (Accession No: U07050) an A, at a position corresponding to position 39508 of the MRP1 gene (Accession No: GI:7209451) or at a position corresponding to position 17900, 18067 and/or 18195 of the MRP1 gene (Accession No: U91318) or at a position corresponding to position 174 of the MRP1 gene (Accession No: AF022828) or at a position corresponding to position 440 and/or 1163 of the MRP1 gene (Accession No: U07050) a T, at a position corresponding to position 88 of the MRP1 gene (Accession No: AF022830) or at a position corresponding to position 95 of the MRP1 gene (Accession No: AF02283 1) or at a position corresponding to position 27159, 55472 and/or 34215 of the MRP1 gene (Accession No: AC003026) or at a position corresponding to position 124667 and/or 38646 of the MRP1 gene (Accession No: AC026452) or at a position corresponding to position 53282 of the MRP1 gene (Accession No: GI:7209451) or at a position corresponding to position 137710 of the MRP1 gene (Accession No: AC026452) a C, at a position corresponding to position 249 of the MRP1 gene (Accession No: AF022830) or at a position corresponding to position 258 of the MRP1 gene (Accession No: AF022829) or at a position corresponding to position 259 of the MRP1 gene (Accession No: AF02283 1) or at a position corresponding to position 381 of the MRP1 gene (Accession No: U07050) a G, at a position corresponding to position 17970 of the MRP1 gene (Accession No: U91318) a deletion of a T or at a position corresponding to position 34206 to 34207 of the MRP1 gene (Accession No: AC003026) a deletion of a AT or at a position corresponding to position 1720 to 1723 of the MRP1 gene (Accession No: U07050) a deletion of GGTA, at a position corresponding to position 926/927 a insertion of a T and/or 437/438 of the MRP1 gene (Accession No: U07050) a insertion of a TCCTTCC, at a position corresponding to position 55156/55157 of the MRP1 gene (Accession No: AC003026) a insertion of TGGGGC;
(e) a polynucleotide encoding an MRP1 polypeptide or fragment thereof, wherein said polypeptide comprises an amino acid substitution at a position corresponding to positions 600, 602, and/or 604 of the MRP1 polypeptide (Accession No: G2828206);
(f) a polynucleotide encoding an MRP1 polypeptide or fragment thereof, wherein said polypeptide comprises an amino acid substitution of Phe to Cys at a position corresponding to position 239 of the MRP1 polypeptide (Accession No: G2828206) or/and Arg to Ser at a position corresponding to position 433 of the MRP1 polypeptide (Accession No: G2828206) or/and Arg to Gin at a position corresponding to position 723 of the MRP1 polypeptide (Accession No: G2828206).

29. The use of claim 28, wherein a nucleotide deletion, addition and/or substitution comprised by said polynucleotide results in an altered expression of the variant allele compared to the corresponding wild type alleles.

30. The use of claim 29, wherein said altered expression is decreased or increased expression.

31. The use of claim 28, wherein a nucleotide deletion, addition and/or substitution comprised by said polynucleotide results in an altered activity of the polypeptide encoded by the variant allele compared to the polypeptide encoded by the corresponding wild type allele.

32. The use of claim 31, wherein said altered activity is decreased or increased activity.

33. The use of claim 28, wherein said subject is an animal.

34. The use of claim 33, wherein said subject is a mouse.

35. The use of claim 28, wherein said subject is a human.

36. The use of claim 35, wherein said human is African or Asian.

37. A method for selecting a suitable therapy for a subject suffering from colorectal cancer, cervical cancer, gastric cancer, lung cancer, malignant glioma, ovarian cancer, and pancreatic cancer, wherein said method comprises:
(a) determining the presence or absence of a variant allele as specified in claim 28 in the genome of a subject in a sample obtained from said subject; and
(b) selecting a suitable therapy for said subject based on the results obtained in (a).
